United States Patent Application Publication US 2026/0327576 A1, published October 22, 2026 (application 19/113,985).

The application's sequence listing, which the Patent Office published only in electronic form, follows.

SEQUENCE LISTING (85 sequences)

SEQ ID NO: 1 - DNA, 10723 bp, synthetic construct
  source 1..10723: mol_type = other DNA
agttgttagtctacgtggaccgacaaagacagattctttgagggagctaagctcaacgtagttctaacagttttttaattagagagcagatctctgatgaataaccaacggaaaaaggcgaaaaacacgcctttcaatatgctgaaacgcgagagaaaccgcgtgtcgactgtgcaacagctgacaaagagattctcacttggaatgctgcagggacgaggaccattaaaactgttcatggccctggtggcgttccttcgtttcctaacaatcccaccaacagcagggatattgaagagatggggaacaattaaaaaatcaaaagctattaatgttttgagagggttcaggaaagagattggaaggatgctgaacatcttgaataggagacgcagatctgcaggcatgatcattatgctgattccaacagtgatggcgttccatttaaccacacgtaacggagaaccacacatgatcgtcagcagacaagagaaagggaaaagtcttctgtttaaaacagaggatggcgtgaacatgtgtaccctcatggccatggaccttggtgaattgtgtgaagacacaatcacgtacaagtgtccccttctcaggcagaatgagccagaagacatagactgttggtgcaactctacgtccacgtgggtaacttatgggacgtgtaccaccatgggagaacatagaagagaaaaaagatcagtggcactcgttccacatgtgggaatgggactggagacacgaactgaaacatggatgtcatcagaaggggcctggaaacatgtccagagaattgaaacttggatcttgagacatccaggcttcaccatgatggcagcaatcctggcatacaccataggaacgacacatttccaaagagccctgattttcatcttactgacagctgtcactccttcaatgacaatgcgttgcataggaatgtcaaatagagactttgtggaaggggtttcaggaggaagctgggttgacatagtcttagaacatggaagctgtgtgacgacgatggcaaaaaacaaaccaacattggattttgaactgataaaaacagaagccaaacagcctgccaccctaaggaagtactgtatagaggcaaagctaaccaacacaacaacagaatctcgctgcccaacacaaggggaacccagcctaaatgaagagcaggacaaaaggttcgtctgcaaacactccatggtagacagaggatggggaaatggatgtggactatttggaaagggaggcattgtgacctgtgctatgttcagatgcaaaaagaacatggaaggaaaagttgtgcaaccagaaaacttggaatacaccattgtgataacacctcactcaggggaagagcatgcagtcggaaatgacacaggaaaacatggcaaggaaatcaaaataacaccacagagttccatcacagaagcagaattgacaggttatggcactgtcacaatggagtgctctccaagaacgggcctcgacttcaatgagatggtgttgctgcagatggaaaataaagcttggctggtgcacaggcaatggttcctagacctgccgttaccatggttgcccggagcggacacacaagggtcaaattggatacagaaagagacattggtcactttcaaaaatccccatgcgaagaaacaggatgttgttgttttaggatcccaagaaggggccatgcacacagcacttacaggggccacagaaatccaaatgtcatcaggaaacttactcttcacaggacatctcaagtgcaggctgagaatggacaagctacagctcaaaggaatgtcatactctatgtgcacaggaaagtttaaagttgtgaaggaaatagcagaaacacaacatggaacaatagttatcagagtgcaatatgaaggggacggctctccatgcaagatcccttttgagataatggatttggaaaaaagacatgtcttaggtcgcctgattacagtcaacccaattgtgacagaaaaagatagcccagtcaacatagaagcagaacctccattcggagacagctacatcatcataggagtagagccgggacaactgaagctcaactggtttaagaaaggaagttctatcggccaaatgtttgagacaacaatgaggggggcgaagagaatggccattttaggtgacacagcctgggattttggatccttgggaggagtgtttacatctataggaaaggctctccaccaagtctttggagcaatctatggagctgccttcagtggggtttcatggactatgaaaatcctcataggagtcattatcacatggataggaatgaattcacgcagcacctcactgtctgtgacactagtattggtgggaattgtgacactgtatttgggagtcatggtgcaggccgatagtggttgcgttgtgagctggaaaaacaaagaacttaagtgtggcagtgggattttcatcacagacaacgtgcacacatggacagaacaatacaagttccaaccagaatccccttcaaaactagcttcagctatccagaaagcccatgaagagggcatttgtggaatccgctcagtaacaagactggagaatctgatgtggaaacaaataacaccagaattgaatcacattctatcagaaaatgaggtgaagttaactattatgacaggagacatcaaaggaatcatgcaggcaggaaaacgatctctgcggcctcagcccactgagctgaagtattcatggaaaacatggggcaaagcaaaaatgctctctacagagtctcataaccagacctttctcattgatggccccgaaacagcagaatgccccaacacaaatagagcttggaattcgttggaagttgaagactatggctttggagtattcaccaccaatatatggctaaaattgaaagaaaaacaggatgtattctgcgactcaaaactcatgtcagcggccataaaagacaacagagccgtccatgccgatatgggttattggatagaaagtgcactcaatgacacatggaagatagagaaagcctctttcattgaagttaaaaactgccactggccaaaatcacacaccctctggagcaatggagtgctagaaagtgagatgataattccaaagaatctcgctggaccagtgtctcaacacaactatagaccaggctaccatacacaaataacaggaccatggcatctaggtaagcttgagatggactttgatttctgtgatggaacaacagtggtagtgactgaggactgcggaaatagaggaccctctttgagaacaaccactgcctctggaaaactcataacagaatggtgctgccgatcttgcacattaccaccgctaagatacagaggtgaggatgggtgctggtacgggatggaaatcagaccattgaaggagaaagaagagaatttggtcaactccttggtcacagctggacatgggcaggtcgacaacttttcactaggagtcttgggaatggcattgttcctggaggaaatgcttaggacccgagtaggaacgaaacatgcaatactactagttgcagtttcttttgtgacattgatcacagggaacatgtcctttagagacctgggaagagtgatggttatggtaggcgccactatgacggatgacataggtatgggcgtgacttatcttgccctactagcagccttcaaagtcagaccaacttttgcagctggactactcttgagaaagctgacctccaaggaattgatgatgactactataggaattgtactcctctcccagagcaccataccagagaccattcttgagttgactgatgcgttagccttaggcatgatggtcctcaaaatggtgagaaatatggaaaagtatcaattggcagtgactatcatggctatcttgtgcgtcccaaacgcagtgatattacaaaacgcatggaaagtgagttgcacaatattggcagtggtgtccgtttccccactgctcttaacatcctcacaacagaaaacggattggataccattagcattgacgatcaaaggtctcaatccaacagctatttttctaacaaccctctcaagaaccagcaagaaaaggagctggccattaaatgaggctatcatggcagtcgggatggtgagcattttagccagttctctcctaaaaaatgatattcccatgacaggaccattagtggctggagggctcctcactgtgtgctacgtgctcactggacgatcggccgatttggaactggagagagcagccgatgtcaaatgggaagaccaggcagagatatcaggaagcagtccaatcctgtcaataacaatatcagaagatggtagcatgtcgataaaaaatgaagaggaagaacaaacactgaccatactcattagaacaggattgctggtgatctcaggactttttcctgtatcaataccaatcacggcagcagcatggtacctgtgggaagtgaagaaacaacgggccggagtattgtgggatgttccttcacccccacccatgggaaaggctgaactggaagatggagcctatagaattaagcaaaaagggattcttggatattcccagatcggagccggagtttacaaagaaggaacattccatacaatgtggcatgtcacacgtggcgctgttctaatgcataaaggaaagaggattgaaccatcatgggcggacgtcaagaaagacctaatatcatatggaggaggctggaagttagaaggagaatggaaggaaggagaagaagtccaggtattggcactggagcctggaaaaaatccaagagccgtccaaacgaaacctggtcttttcaaaaccaacgccggaacaataggtgctgtatctctggacttttctcctggaacgtcaggatctccaattatcgacaaaaaaggaaaagttgtgggtctttatggtaatggtgttgttacaaggagtggagcatatgtgagtgctatagcccagactgaaaaaagcattgaagacaacccagagatcgaagatgacattttccgaaagagaagactgaccatcatggacctccacccaggagcgggaaagacgaagagataccttccggccatagtcagagaagctataaaacggggtttgagaacattaatcttggcccccactagagttgtggcagctgaaatggaggaagcccttagaggacttccaataagataccagaccccagccatcagagctgagcacaccgggcgggagattgtggacctaatgtgtcatgccacatttaccatgaggctgctatcaccagttagagtgccaaactacaacctgattatcatggacgaagcccatttcacagacccagcaagtatagcagctagaggatacatctcaactcgagtggagatgggtgaggcagctgggatttttatgacagccactcccccgggaagcagagacccatttcctcagagcaatgcaccaatcatagatgaagaaagagaaatccctgaacgttcgtggaattccggacatgaatgggtcacggattttaaagggaagactgtttggttcgttccaagtataaaagcaggaaatgatatagcagcttgcctgaggaaaaatggaaagaaagtgatacaactcagtaggaagacctttgattctgagtatgtcaagactagaaccaatgattgggacttcgtggttacaactgacatttcagaaatgggtgccaatttcaaggctgagagggttatagaccccagacgctgcatgaaaccagtcatactaacagatggtgaagagcgggtgattctggcaggacctatgccagtgacccactctagtgcagcacaaagaagagggagaataggaagaaatccaaaaaatgagaatgaccagtacatatacatgggggaacctctggaaaatgatgaagactgtgcacactggaaagaagctaaaatgctcctagataacatcaacacgccagaaggaatcattcctagcatgttcgaaccagagcgtgaaaaggtggatgccattgatggcgaataccgcttgagaggagaagcaaggaaaacctttgtagacttaatgagaagaggagacctaccagtctggttggcctacagagtggcagctgaaggcatcaactacgcagacagaaggtggtgttttgatggagtcaagaacaaccaaatcctagaagaaaacgtggaagttgaaatctggacaaaagaaggggaaaggaagaaattgaaacccagatggttggatgctaggatctattctgacccactggcgctaaaagaatttaaggaatttgcagccggaagaaagtctctgaccctgaacctaatcacagaaatgggtaggctcccaaccttcatgactcagaaggcaagagacgcactggacaacttagcagtgctgcacacggctgaggcaggtggaagggcgtacaaccatgctctcagtgaactgccggagaccctggagacattgcttttactgacacttctggctacagtcacgggagggatctttttattcttgatgagcggaaggggcatagggaagatgaccctgggaatgtgctgcataatcacggctagcatcctcctatggtacgcacaaatacagccacactggatagcagcttcaataatactggagttttttctcatagttttgcttattccagaacctgaaaaacagagaacaccccaagacaaccaactgacctacgttgtcatagccatcctcacagtggtggccgcaaccatggcaaacgagatgggtttcctagaaaaaacgaagaaagatctcggattgggaagcattgcaacccagcaacccgagagcaacatcctggacatagatctacgtcctgcatcagcatggacgctgtatgccgtggccacaacatttgttacaccaatgttgagacatagcattgaaaattcctcagtgaatgtgtccctaacagctatagccaaccaagccacagtgttaatgggtctcgggaaaggatggccattgtcaaagatggacatcggagttccccttctcgccattggatgctactcacaagtcaaccccataactctcacagcagctcttttcttattggtagcacattatgccatcatagggccaggactccaagcaaaagcaaccagagaagctcagaaaagagcagcggcgggcatcatgaaaaacccaactgtcgatggaataacagtgattgacctagatccaataccttatgatccaaagtttgaaaagcagttgggacaagtaatgctcctagtcctctgcgtgactcaagtattgatgatgaggactacatgggctctgtgtgaggctttaaccttagctaccgggcccatctccacattgtgggaaggaaatccagggaggttttggaacaccaccattgcggtgtcaatggctaacatttttagagggagttacttggccggagctggacttctcttttctattatgaagaacacaaccaacacaagaaggggaactggcaacataggagagacgcttggagagaaatggaaaagccgattgaacgcattgggaaaaagtgaattccagatctacaagaaaagtggaatccaggaagtggatagaaccttagcaaaagaaggcattaaaagaggagaaacggaccatcacgctgtgtcgcgaggctcagcaaaactgagatggttcgttgagagaaacatggtcacaccagaagggaaagtagtggacctcggttgtggcagaggaggctggtcatactattgtggaggactaaagaatgtaagagaagtcaaaggcctaacaaaaggaggaccaggacacgaagaacccatccccatgtcaacatatgggtggaatctagtgcgtcttcaaagtggagttgacgttttcttcatcccgccagaaaagtgtgacacattattgtgtgacataggggagtcatcaccaaatcccacagtggaagcaggacgaacactcagagtccttaacttagtagaaaattggttgaacaacaacactcaattttgcataaaggttctcaacccatatatgccctcagttatagaaaaaatggaagcactacaaaggaaatatggaggagccttagtgaggaatccactctcacgaaactccacacatgagatgtactgggtatccaatgcttccgggaacatagtgtcatcagtgaacatgatttcaaggatgttgatcaacagatttacaatgagatacaagaaagccacttacgagccggatgttgacctcggaagcggaacccgtaacatcgggattgaaagtgagataccaaacctagatataattgggaaaagaatagaaaaaataaagcaagagcatgaaacatcatggcactatgaccaagaccacccatacaaaacgtgggcataccatggtagctatgaaacaaaacagactggatcagcatcatccatggtcaacggagtggtcaggctgctgacaaaaccttgggacgtcgtccccatggtgacacagatggcaatgacagacacgactccatttggacaacagcgcgtttttaaagagaaagtggacacgagaacccaagaaccgaaagaaggcacgaagaaactaatgaaaataacagcagagtggctttggaaagaattagggaagaaaaagacacccaggatgtgcaccagagaagaattcacaagaaaggtgagaagcaatgcagccttgggggccatattcactgatgagaacaagtggaagtcggcacgtgaggctgttgaagatagtaggttttgggagctggttgacaaggaaaggaatctccatcttgaaggaaagtgtgaaacatgtgtgtacaacatgatgggaaaaagagagaagaagctaggggaattcggcaaggcaaaaggcagcagagccatatggtacatgtggcttggagcacgcttcttagagtttgaagccctaggattcttaaatgaagatcactggttctccagagagaactccctgagtggagtggaaggagaagggctgcacaagctaggttacattctaagagacgtgagcaagaaagagggaggagcaatgtatgccgatgacaccgcaggatgggatacaagaatcacactagaagacctaaaaaatgaagaaatggtaacaaaccacatggaaggagaacacaagaaactagccgaggccattttcaaactaacgtaccaaaacaaggtggtgcgtgtgcaaagaccaacaccaagaggcacagtaatggacatcatatcgagaagagaccaaagaggtagtggacaagttggcacctatggactcaatactttcaccaatatggaagcccaactaatcagacagatggagggagaaggagtctttaaaagcattcagcacctaacaatcacagaagaaatcgctgtgcaaaactggttagcaagagtggggcgcgaaaggttatcaagaatggccatcagtggagatgattgtgttgtgaaacctttagatgacaggttcgcaagcgctttaacagctctaaatgacatgggaaagattaggaaagacatacaacaatgggaaccttcaagaggatggaatgattggacacaagtgcccttctgttcacaccatttccatgagttaatcatgaaagacggtcgcgtactcgttgttccatgtagaaaccaagatgaactgattggcagagcccgaatctcccaaggagcagggtggtctttgcgggagacggcctgtttggggaagtcttacgcccaaatgtggagcttgatgtacttccacagacgcgacctcaggctggcggcaaatgctatttgctcggcagtaccatcacattgggttccaacaagtcgaacaacctggtccatacatgctaaacatgaatggatgacaacggaagacatgctgacagtctggaacagggtgtggattcaagaaaacccatggatggaagacaaaactccagtggaatcatgggaggaaatcccatacttggggaaaagagaagaccaatggtgcggctcattgattgggttaacaagcagggccacctgggcaaagaacatccaagcagcaataaatcaagttagatcccttataggcaatgaagaatacacagattacatgccatccatgaaaagattcagaagagaagaggaagaagcaggagttctgtggtagaaagcaaaactaacatgaaacaaggctagaagtcaggtcggattaagccatagtacggaaaaaactatgctacctgtgagccccgtccaaggacgttaaaagaagtcaggccatcataaatgccatagctggagtaaactatgcagcctgtagctccacctgagaaggtgtaaaaaatccgggaggccacaaaccatggaagctgtacgcatggcgtagtggactagcggttagaggagacccctcccttacaaatcgcagcaacaatgggggcccaaggcgagatgaagctgtagtctcgctggaaggactagaggttagaggagacccccccgaaacaaaaaacagcatattgacgctgggaaagaccagagatcctgctgtctcctcagcatcattccaggcacagaacgccagaaaatggaatggtgctgttgaatcaacaggttct

SEQ ID NO: 2 - DNA, 10176 bp, synthetic construct
  source 1..10176: mol_type = other DNA
atgaataaccaacggaaaaaggcgaaaaacacgcctttcaatatgctgaaacgcgagagaaaccgcgtgtcgactgtgcaacagctgacaaagagattctcacttggaatgctgcagggacgaggaccattaaaactgttcatggccctggtggcgttccttcgtttcctaacaatcccaccaacagcagggatattgaagagatggggaacaattaaaaaatcaaaagctattaatgttttgagagggttcaggaaagagattggaaggatgctgaacatcttgaataggagacgcagatctgcaggcatgatcattatgctgattccaacagtgatggcgttccatttaaccacacgtaacggagaaccacacatgatcgtcagcagacaagagaaagggaaaagtcttctgtttaaaacagaggatggcgtgaacatgtgtaccctcatggccatggaccttggtgaattgtgtgaagacacaatcacgtacaagtgtccccttctcaggcagaatgagccagaagacatagactgttggtgcaactctacgtccacgtgggtaacttatgggacgtgtaccaccatgggagaacatagaagagaaaaaagatcagtggcactcgttccacatgtgggaatgggactggagacacgaactgaaacatggatgtcatcagaaggggcctggaaacatgtccagagaattgaaacttggatcttgagacatccaggcttcaccatgatggcagcaatcctggcatacaccataggaacgacacatttccaaagagccctgattttcatcttactgacagctgtcactccttcaatgacaatgcgttgcataggaatgtcaaatagagactttgtggaaggggtttcaggaggaagctgggttgacatagtcttagaacatggaagctgtgtgacgacgatggcaaaaaacaaaccaacattggattttgaactgataaaaacagaagccaaacagcctgccaccctaaggaagtactgtatagaggcaaagctaaccaacacaacaacagaatctcgctgcccaacacaaggggaacccagcctaaatgaagagcaggacaaaaggttcgtctgcaaacactccatggtagacagaggatggggaaatggatgtggactatttggaaagggaggcattgtgacctgtgctatgttcagatgcaaaaagaacatggaaggaaaagttgtgcaaccagaaaacttggaatacaccattgtgataacacctcactcaggggaagagcatgcagtcggaaatgacacaggaaaacatggcaaggaaatcaaaataacaccacagagttccatcacagaagcagaattgacaggttatggcactgtcacaatggagtgctctccaagaacgggcctcgacttcaatgagatggtgttgctgcagatggaaaataaagcttggctggtgcacaggcaatggttcctagacctgccgttaccatggttgcccggagcggacacacaagggtcaaattggatacagaaagagacattggtcactttcaaaaatccccatgcgaagaaacaggatgttgttgttttaggatcccaagaaggggccatgcacacagcacttacaggggccacagaaatccaaatgtcatcaggaaacttactcttcacaggacatctcaagtgcaggctgagaatggacaagctacagctcaaaggaatgtcatactctatgtgcacaggaaagtttaaagttgtgaaggaaatagcagaaacacaacatggaacaatagttatcagagtgcaatatgaaggggacggctctccatgcaagatcccttttgagataatggatttggaaaaaagacatgtcttaggtcgcctgattacagtcaacccaattgtgacagaaaaagatagcccagtcaacatagaagcagaacctccattcggagacagctacatcatcataggagtagagccgggacaactgaagctcaactggtttaagaaaggaagttctatcggccaaatgtttgagacaacaatgaggggggcgaagagaatggccattttaggtgacacagcctgggattttggatccttgggaggagtgtttacatctataggaaaggctctccaccaagtctttggagcaatctatggagctgccttcagtggggtttcatggactatgaaaatcctcataggagtcattatcacatggataggaatgaattcacgcagcacctcactgtctgtgacactagtattggtgggaattgtgacactgtatttgggagtcatggtgcaggccgatagtggttgcgttgtgagctggaaaaacaaagaacttaagtgtggcagtgggattttcatcacagacaacgtgcacacatggacagaacaatacaagttccaaccagaatccccttcaaaactagcttcagctatccagaaagcccatgaagagggcatttgtggaatccgctcagtaacaagactggagaatctgatgtggaaacaaataacaccagaattgaatcacattctatcagaaaatgaggtgaagttaactattatgacaggagacatcaaaggaatcatgcaggcaggaaaacgatctctgcggcctcagcccactgagctgaagtattcatggaaaacatggggcaaagcaaaaatgctctctacagagtctcataaccagacctttctcattgatggccccgaaacagcagaatgccccaacacaaatagagcttggaattcgttggaagttgaagactatggctttggagtattcaccaccaatatatggctaaaattgaaagaaaaacaggatgtattctgcgactcaaaactcatgtcagcggccataaaagacaacagagccgtccatgccgatatgggttattggatagaaagtgcactcaatgacacatggaagatagagaaagcctctttcattgaagttaaaaactgccactggccaaaatcacacaccctctggagcaatggagtgctagaaagtgagatgataattccaaagaatctcgctggaccagtgtctcaacacaactatagaccaggctaccatacacaaataacaggaccatggcatctaggtaagcttgagatggactttgatttctgtgatggaacaacagtggtagtgactgaggactgcggaaatagaggaccctctttgagaacaaccactgcctctggaaaactcataacagaatggtgctgccgatcttgcacattaccaccgctaagatacagaggtgaggatgggtgctggtacgggatggaaatcagaccattgaaggagaaagaagagaatttggtcaactccttggtcacagctggacatgggcaggtcgacaacttttcactaggagtcttgggaatggcattgttcctggaggaaatgcttaggacccgagtaggaacgaaacatgcaatactactagttgcagtttcttttgtgacattgatcacagggaacatgtcctttagagacctgggaagagtgatggttatggtaggcgccactatgacggatgacataggtatgggcgtgacttatcttgccctactagcagccttcaaagtcagaccaacttttgcagctggactactcttgagaaagctgacctccaaggaattgatgatgactactataggaattgtactcctctcccagagcaccataccagagaccattcttgagttgactgatgcgttagccttaggcatgatggtcctcaaaatggtgagaaatatggaaaagtatcaattggcagtgactatcatggctatcttgtgcgtcccaaacgcagtgatattacaaaacgcatggaaagtgagttgcacaatattggcagtggtgtccgtttccccactgctcttaacatcctcacaacagaaaacggattggataccattagcattgacgatcaaaggtctcaatccaacagctatttttctaacaaccctctcaagaaccagcaagaaaaggagctggccattaaatgaggctatcatggcagtcgggatggtgagcattttagccagttctctcctaaaaaatgatattcccatgacaggaccattagtggctggagggctcctcactgtgtgctacgtgctcactggacgatcggccgatttggaactggagagagcagccgatgtcaaatgggaagaccaggcagagatatcaggaagcagtccaatcctgtcaataacaatatcagaagatggtagcatgtcgataaaaaatgaagaggaagaacaaacactgaccatactcattagaacaggattgctggtgatctcaggactttttcctgtatcaataccaatcacggcagcagcatggtacctgtgggaagtgaagaaacaacgggccggagtattgtgggatgttccttcacccccacccatgggaaaggctgaactggaagatggagcctatagaattaagcaaaaagggattcttggatattcccagatcggagccggagtttacaaagaaggaacattccatacaatgtggcatgtcacacgtggcgctgttctaatgcataaaggaaagaggattgaaccatcatgggcggacgtcaagaaagacctaatatcatatggaggaggctggaagttagaaggagaatggaaggaaggagaagaagtccaggtattggcactggagcctggaaaaaatccaagagccgtccaaacgaaacctggtcttttcaaaaccaacgccggaacaataggtgctgtatctctggacttttctcctggaacgtcaggatctccaattatcgacaaaaaaggaaaagttgtgggtctttatggtaatggtgttgttacaaggagtggagcatatgtgagtgctatagcccagactgaaaaaagcattgaagacaacccagagatcgaagatgacattttccgaaagagaagactgaccatcatggacctccacccaggagcgggaaagacgaagagataccttccggccatagtcagagaagctataaaacggggtttgagaacattaatcttggcccccactagagttgtggcagctgaaatggaggaagcccttagaggacttccaataagataccagaccccagccatcagagctgagcacaccgggcgggagattgtggacctaatgtgtcatgccacatttaccatgaggctgctatcaccagttagagtgccaaactacaacctgattatcatggacgaagcccatttcacagacccagcaagtatagcagctagaggatacatctcaactcgagtggagatgggtgaggcagctgggatttttatgacagccactcccccgggaagcagagacccatttcctcagagcaatgcaccaatcatagatgaagaaagagaaatccctgaacgttcgtggaattccggacatgaatgggtcacggattttaaagggaagactgtttggttcgttccaagtataaaagcaggaaatgatatagcagcttgcctgaggaaaaatggaaagaaagtgatacaactcagtaggaagacctttgattctgagtatgtcaagactagaaccaatgattgggacttcgtggttacaactgacatttcagaaatgggtgccaatttcaaggctgagagggttatagaccccagacgctgcatgaaaccagtcatactaacagatggtgaagagcgggtgattctggcaggacctatgccagtgacccactctagtgcagcacaaagaagagggagaataggaagaaatccaaaaaatgagaatgaccagtacatatacatgggggaacctctggaaaatgatgaagactgtgcacactggaaagaagctaaaatgctcctagataacatcaacacgccagaaggaatcattcctagcatgttcgaaccagagcgtgaaaaggtggatgccattgatggcgaataccgcttgagaggagaagcaaggaaaacctttgtagacttaatgagaagaggagacctaccagtctggttggcctacagagtggcagctgaaggcatcaactacgcagacagaaggtggtgttttgatggagtcaagaacaaccaaatcctagaagaaaacgtggaagttgaaatctggacaaaagaaggggaaaggaagaaattgaaacccagatggttggatgctaggatctattctgacccactggcgctaaaagaatttaaggaatttgcagccggaagaaagtctctgaccctgaacctaatcacagaaatgggtaggctcccaaccttcatgactcagaaggcaagagacgcactggacaacttagcagtgctgcacacggctgaggcaggtggaagggcgtacaaccatgctctcagtgaactgccggagaccctggagacattgcttttactgacacttctggctacagtcacgggagggatctttttattcttgatgagcggaaggggcatagggaagatgaccctgggaatgtgctgcataatcacggctagcatcctcctatggtacgcacaaatacagccacactggatagcagcttcaataatactggagttttttctcatagttttgcttattccagaacctgaaaaacagagaacaccccaagacaaccaactgacctacgttgtcatagccatcctcacagtggtggccgcaaccatggcaaacgagatgggtttcctagaaaaaacgaagaaagatctcggattgggaagcattgcaacccagcaacccgagagcaacatcctggacatagatctacgtcctgcatcagcatggacgctgtatgccgtggccacaacatttgttacaccaatgttgagacatagcattgaaaattcctcagtgaatgtgtccctaacagctatagccaaccaagccacagtgttaatgggtctcgggaaaggatggccattgtcaaagatggacatcggagttccccttctcgccattggatgctactcacaagtcaaccccataactctcacagcagctcttttcttattggtagcacattatgccatcatagggccaggactccaagcaaaagcaaccagagaagctcagaaaagagcagcggcgggcatcatgaaaaacccaactgtcgatggaataacagtgattgacctagatccaataccttatgatccaaagtttgaaaagcagttgggacaagtaatgctcctagtcctctgcgtgactcaagtattgatgatgaggactacatgggctctgtgtgaggctttaaccttagctaccgggcccatctccacattgtgggaaggaaatccagggaggttttggaacaccaccattgcggtgtcaatggctaacatttttagagggagttacttggccggagctggacttctcttttctattatgaagaacacaaccaacacaagaaggggaactggcaacataggagagacgcttggagagaaatggaaaagccgattgaacgcattgggaaaaagtgaattccagatctacaagaaaagtggaatccaggaagtggatagaaccttagcaaaagaaggcattaaaagaggagaaacggaccatcacgctgtgtcgcgaggctcagcaaaactgagatggttcgttgagagaaacatggtcacaccagaagggaaagtagtggacctcggttgtggcagaggaggctggtcatactattgtggaggactaaagaatgtaagagaagtcaaaggcctaacaaaaggaggaccaggacacgaagaacccatccccatgtcaacatatgggtggaatctagtgcgtcttcaaagtggagttgacgttttcttcatcccgccagaaaagtgtgacacattattgtgtgacataggggagtcatcaccaaatcccacagtggaagcaggacgaacactcagagtccttaacttagtagaaaattggttgaacaacaacactcaattttgcataaaggttctcaacccatatatgccctcagttatagaaaaaatggaagcactacaaaggaaatatggaggagccttagtgaggaatccactctcacgaaactccacacatgagatgtactgggtatccaatgcttccgggaacatagtgtcatcagtgaacatgatttcaaggatgttgatcaacagatttacaatgagatacaagaaagccacttacgagccggatgttgacctcggaagcggaacccgtaacatcgggattgaaagtgagataccaaacctagatataattgggaaaagaatagaaaaaataaagcaagagcatgaaacatcatggcactatgaccaagaccacccatacaaaacgtgggcataccatggtagctatgaaacaaaacagactggatcagcatcatccatggtcaacggagtggtcaggctgctgacaaaaccttgggacgtcgtccccatggtgacacagatggcaatgacagacacgactccatttggacaacagcgcgtttttaaagagaaagtggacacgagaacccaagaaccgaaagaaggcacgaagaaactaatgaaaataacagcagagtggctttggaaagaattagggaagaaaaagacacccaggatgtgcaccagagaagaattcacaagaaaggtgagaagcaatgcagccttgggggccatattcactgatgagaacaagtggaagtcggcacgtgaggctgttgaagatagtaggttttgggagctggttgacaaggaaaggaatctccatcttgaaggaaagtgtgaaacatgtgtgtacaacatgatgggaaaaagagagaagaagctaggggaattcggcaaggcaaaaggcagcagagccatatggtacatgtggcttggagcacgcttcttagagtttgaagccctaggattcttaaatgaagatcactggttctccagagagaactccctgagtggagtggaaggagaagggctgcacaagctaggttacattctaagagacgtgagcaagaaagagggaggagcaatgtatgccgatgacaccgcaggatgggatacaagaatcacactagaagacctaaaaaatgaagaaatggtaacaaaccacatggaaggagaacacaagaaactagccgaggccattttcaaactaacgtaccaaaacaaggtggtgcgtgtgcaaagaccaacaccaagaggcacagtaatggacatcatatcgagaagagaccaaagaggtagtggacaagttggcacctatggactcaatactttcaccaatatggaagcccaactaatcagacagatggagggagaaggagtctttaaaagcattcagcacctaacaatcacagaagaaatcgctgtgcaaaactggttagcaagagtggggcgcgaaaggttatcaagaatggccatcagtggagatgattgtgttgtgaaacctttagatgacaggttcgcaagcgctttaacagctctaaatgacatgggaaagattaggaaagacatacaacaatgggaaccttcaagaggatggaatgattggacacaagtgcccttctgttcacaccatttccatgagttaatcatgaaagacggtcgcgtactcgttgttccatgtagaaaccaagatgaactgattggcagagcccgaatctcccaaggagcagggtggtctttgcgggagacggcctgtttggggaagtcttacgcccaaatgtggagcttgatgtacttccacagacgcgacctcaggctggcggcaaatgctatttgctcggcagtaccatcacattgggttccaacaagtcgaacaacctggtccatacatgctaaacatgaatggatgacaacggaagacatgctgacagtctggaacagggtgtggattcaagaaaacccatggatggaagacaaaactccagtggaatcatgggaggaaatcccatacttggggaaaagagaagaccaatggtgcggctcattgattgggttaacaagcagggccacctgggcaaagaacatccaagcagcaataaatcaagttagatcccttataggcaatgaagaatacacagattacatgccatccatgaaaagattcagaagagaagaggaagaagcaggagttctgtggtag

SEQ ID NO: 3 - DNA, 10723 bp, synthetic construct
  source 1..10723: mol_type = other DNA
agttgttagtctacgtggaccgacaaagacagattctttgagggagctaagctcaacgtagttctaacagttttttaattagagagcagatctctgatgaataaccaacggaaaaaggcgaaaaacacgcctttcaatatgctgaaacgcgagagaaaccgcgtgtcgactgtgcagcagctgacaaagagattcagcctgggaatgctgcagggaaggggaccactgaagctgtttatggccctggtggccttcctgcggtttctgaccatcccccctacagccggcatcctgaagagatggggcaccatcaagaagtccaaggccatcaacgtgctgcgcggctttcggaaggagatcggccggatgctgaatatcctgaaccggagaaggcgctctgccggcatgatcatcatgctgatcccaaccgtgatggccttccacctgaccacacgcaatggcgagccccacatgatcgtgtcccggcaggagaagggcaagtctctgctgtttaagacagaggacggcgtgaacatgtgcaccctgatggctatggacctgggcgagctgtgcgaggataccatcacatacaagtgtcctctgctgagacagaatgagccagaggacatcgattgctggtgtaacagcacctccacatgggtgacctacggcacctgtaccacaatgggcgagcaccggagagagaagcggagcgtggccctggtgccccacgtgggaatgggcctggagaccagaacagagacctggatgagctccgagggagcatggaagcacgtgcagcgcatcgagacatggattctgaggcaccccggcttcaccatgatggcagccatcctggcctacacaatcggcaccacacacttccagcgggccctgatctttatcctgctgacagccgtgacccctagcatgaccatgagatgcatcggcatgtccaatagggacttcgtggagggcgtgtctggaggcagctgggtggacatcgtgctggagcacggctcctgcgtgaccacaatggccaagaacaagcctaccctggactttgagctgatcaagacagaggccaagcagccagccaccctgcggaagtattgcatcgaggccaagctgaccaataccacaaccgagagccggtgtccaacacagggagagcctagcctgaacgaggagcaggacaagcggttcgtgtgcaagcacagcatggtggataggggctggggcaatggctgtggcctgttcggcaagggcggcatcgtgacctgcgccatgtttaggtgtaagaagaatatggagggcaaggtggtgcagcctgagaacctggagtacaccatcgtgatcacaccacactccggagaggagcacgcagtgggaaacgataccggcaagcacggcaaggagatcaagatcacaccacagtctagcatcaccgaggccgagctgacaggctatggcacagtgacaatggagtgcagccccaggaccggcctggacttcaatgagatggtgctgctgcagatggagaacaaggcctggctggtgcaccgccagtggtttctggacctgcctctgccctggctgcctggcgcagatacccagggcagcaattggattcagaaggagacactggtgaccttcaagaacccacacgccaagaagcaggatgtggtggtgctgggctcccaggagggagcaatgcacacagccctgaccggagccacagagatccagatgtcctctggcaacctgctgttcaccggacacctgaagtgccgcctgaggatggacaagctgcagctgaagggcatgtcttacagcatgtgcaccggcaagtttaaggtggtgaaggagatcgccgagacccagcacggcacaatcgtgatcagggtgcagtatgagggcgacggcagcccttgtaagatccccttcgagatcatggatctggagaagaggcacgtgctgggccggctgatcacagtgaatccaatcgtgaccgagaaggactctcccgtgaacatcgaggccgagccaccctttggcgatagctacatcatcatcggcgtggagcctggccagctgaagctgaattggttcaagaagggcagctccatcggccagatgtttgagacaaccatgagaggcgccaagaggatggcaatcctgggcgacaccgcatgggatttcggcagcctgggaggcgtgtttacatccatcggcaaggccctgcaccaggtgttcggagccatctatggcgccgccttttccggcgtgtcttggaccatgaagatcctgatcggcgtgatcatcacatggatcggcatgaactccagatctaccagcctgtccgtgacactggtgctggtgggcatcgtgaccctgtacctgggcgtgatggtgcaggccgattctggctgcgtggtgagctggaagaataaggagctgaagtgtggctccggcatcttcatcacagacaacgtgcacacatggaccgagcagtataagtttcagcctgagtctccaagcaagctggcctctgccatccagaaggcacacgaggagggcatctgcggcatccgcagcgtgacccggctggagaatctgatgtggaagcagatcacacccgagctgaatcacatcctgtccgagaacgaggtgaagctgaccatcatgacaggcgacatcaagggcatcatgcaggccggcaagagatctctgaggccccagcctacagagctgaagtacagctggaagacctggggcaaggccaagatgctgagcacagagtcccacaaccagaccttcctgatcgatggccccgagacagccgagtgccctaataccaacagggcctggaacagcctggaggtggaggactacggcttcggcgtgtttacaaccaacatctggctgaagctgaaggagaagcaggacgtgttctgtgatagcaagctgatgtccgccgccatcaaggacaatcgcgccgtgcacgccgatatgggctattggatcgagagcgccctgaacgacacctggaagatcgagaaggcctcctttatcgaggtgaagaattgtcactggcctaagtcccacacactgtggtctaacggcgtgctggagtccgagatgatcatcccaaagaatctggccggccccgtgtctcagcacaactaccggcctggctatcacacccagatcacaggcccctggcacctgggcaagctggagatggacttcgatttttgcgacggcacaaccgtggtggtgaccgaggattgtggcaacagaggcccatctctgaggacaaccacagccagcggcaagctgatcacagagtggtgctgtcggagctgcaccctgcctccactgagatacaggggcgaggatggctgttggtatggcatggagatcagacccctgaaggagaaggaggagaatctggtgaacagcctggtgaccgcaggccacggccaggtggacaatttctccctgggcgtgctgggcatggccctgtttctggaggagatgctgcgcaccagagtgggcacaaagcacgccatcctgctggtggccgtgtccttcgtgaccctgatcacaggcaacatgtcttttagagacctgggcagagtgatggtcatggtgggcgccacaatgaccgacgacatcggcatgggagtgacctacctggccctgctggcagccttcaaggtgcgcccaacctttgccgcaggactgctgctgaggaagctgacatccaaggagctgatgatgaccacaatcggcatcgtgctgctgtcccagtctaccatccccgagacaatcctggagctgaccgatgcactggccctgggcatgatggtgctgaagatggtgagaaatatggagaagtatcagctggccgtgaccatcatggccatcctgtgcgtgcccaatgccgtgatcctgcagaacgcctggaaggtgagctgtacaatcctggccgtggtgagcgtgtcccctctgctgctgacatctagccagcagaagaccgactggattcccctggccctgacaatcaagggcctgaaccctaccgccatcttcctgaccacactgtctcgcaccagcaagaagcggagctggcccctgaatgaggccatcatggccgtgggcatggtgtccatcctggcctcctctctgctgaagaacgacatccctatgaccggaccactggtggcaggaggactgctgacagtgtgctacgtgctgaccggcagatccgccgacctggagctggagagggcagcagacgtgaagtgggaggatcaggccgagatctctggcagctcccccatcctgtctatcaccatcagcgaggacggctctatgagcatcaagaacgaggaggaggagcagacactgaccatcctgatcaggaccggcctgctggtcatcagcggcctgttccccgtgtccatccctatcacagctgccgcctggtacctgtgggaggtgaagaagcagagggcaggcgtgctgtgggacgtgccttctccccctccaatgggcaaggccgagctggaggatggcgcctatcgcatcaagcagaagggcatcctgggatacagccagatcggagcaggcgtgtataaggagggcacctttcacacaatgtggcacgtgaccagaggcgccgtgctgatgcacaagggcaagaggatcgagcctagctgggccgacgtgaagaaggatctgatctcctacggcggaggatggaagctggagggagagtggaaggagggagaggaggtgcaggtgctggccctggagccaggcaagaatcccagagccgtgcagaccaagccaggcctgttcaagaccaacgcaggcacaatcggagccgtgtccctggacttttctcctggcacatccggctctccaatcatcgataagaagggcaaggtggtgggcctgtacggaaatggagtggtgacccggagcggagcctacgtgagcgccatcgcccagacagagaagtccatcgaggacaaccccgagatcgaggacgacatcttccggaagaggcgcctgaccatcatggatctgcacccaggcgccggcaagacaaagagatacctgccagcaatcgtgcgggaggccatcaagaggggactgcggacactgatcctggcacctaccagggtggtggcagcagagatggaggaggccctgagaggcctgcccatcaggtatcagacacctgccatcagagccgagcacaccggcagggagatcgtggacctgatgtgccacgccacattcaccatgaggctgctgagccctgtgcgggtgccaaattacaacctgatcatcatggacgaggcccactttaccgatccagcctctatcgccgccagaggctatatcagcacaagggtggagatgggagaggcagcaggaatcttcatgacagcaaccccccctggctcccgcgacccatttccccagtctaatgcccccatcatcgatgaggagcgcgagatccctgagcggtcctggaactctggccacgagtgggtgacagacttcaagggcaagaccgtgtggtttgtgccctccatcaaggccggcaatgacatcgccgcctgcctgagaaagaacggcaagaaagtgatccagctgtctaggaagaccttcgacagcgagtacgtgaagacacgcaccaatgactgggatttcgtggtgaccacagacatcagcgagatgggcgccaactttaaggccgagagagtgatcgacccacggagatgtatgaagcccgtgatcctgaccgatggcgaggagagagtgatcctggccggccctatgccagtgacacactctagcgccgcacagaggcgcggcagaatcggaaggaatcccaagaatgagaacgatcagtacatctatatgggcgagcctctggagaacgacgaggattgcgcccactggaaggaggccaagatgctgctggacaatatcaacaccccagagggcatcatccccagcatgttcgagcctgagagggagaaggtggacgccatcgatggagagtacagactgaggggagaggcaaggaagacatttgtggacctgatgaggagaggcgatctgcccgtgtggctggcatacagggtggcagccgagggcatcaattatgccgacaggcgctggtgtttcgatggcgtgaagaacaatcagatcctggaggagaacgtggaggtggagatctggaccaaggagggcgagaggaagaagctgaagcccagatggctggacgccaggatctactctgatcctctggccctgaaggagttcaaggagtttgcagcaggaaggaagagcctgaccctgaacctgatcacagagatgggccgcctgcctacctttatgacacagaaggccagagacgccctggataatctggccgtgctgcacaccgcagaggcaggcggcagagcatataaccacgccctgtctgagctgccagagaccctggagacactgctgctgctgacactgctggccacagtgaccggcggcatcttcctgtttctgatgagcggcagaggcatcggcaagatgacactgggcatgtgctgtatcatcaccgccagcatcctgctgtggtacgcccagatccagccacactggatcgccgcctccatcatcctggagttctttctgatcgtgctgctgatccccgagcctgagaagcagcggacaccccaggataatcagctgacctacgtggtcatcgccatcctgaccgtggtggccgccacaatggccaacgagatgggcttcctggagaagaccaagaaggacctgggactgggctccatcgcaacacagcagccagagtctaacatcctggacatcgatctgaggccagcaagcgcctggaccctgtacgcagtggccaccacatttgtgacacccatgctgcgccactccatcgagaacagcagcgtgaacgtgtctctgacagccatcgccaatcaggcaaccgtgctgatgggactgggcaagggatggccactgtccaagatggacatcggcgtgcccctgctggcaatcggatgctactctcaggtgaaccccatcacactgaccgccgccctgttcctgctggtggcacactatgccatcatcggccctggcctgcaggccaaggccacccgcgaggcacagaagagggctgccgccggcatcatgaagaatcccaccgtggacggcatcacagtgatcgacctggaccccatcccctacgatcctaagttcgagaagcagctgggccaggtcatgctgctggtgctgtgcgtgacccaggtgctgatgatgaggaccacatgggcactgtgcgaggccctgaccctggcaacaggccctatctccacactgtgggagggcaatccaggcaggttttggaacaccacaatcgccgtgagcatggccaacatcttccgcggctcctacctggcaggagcaggactgctgttttctatcatgaagaataccacaaacacccggagaggcacaggcaatatcggcgagaccctgggcgagaagtggaagtctcggctgaacgccctgggcaagagcgagttccagatctataagaagtccggcatccaggaggtggaccgcaccctggcaaaggagggcatcaagaggggagagacagatcaccacgccgtgagcagaggctccgccaagctgagatggtttgtggagaggaacatggtgacccccgagggcaaggtggtggatctgggatgcggccggggaggctggagctactattgtggaggcctgaagaatgtgagagaggtgaagggactgaccaagggaggccctggccacgaggagcctatcccaatgtccacatacggctggaacctggtgcgcctgcagtctggcgtggacgtgttctttatcccacccgagaagtgcgacaccctgctgtgcgacatcggcgagagctcccccaatcctacagtggaggcaggacgcaccctgcgggtgctgaatctggtggagaactggctgaacaataacacccagttctgcatcaaggtgctgaacccctacatgccttccgtgatcgagaagatggaggccctgcagaggaagtatggcggcgccctggtgcgcaatcctctgtctcggaacagcacccacgagatgtattgggtgtccaatgcctctggcaacatcgtgtctagcgtgaatatgatcagccgcatgctgatcaaccgctttacaatgcggtacaagaaggccacctatgagccagacgtggatctgggcagcggcacccggaatatcggcatcgagtccgagatccccaacctggacatcatcggcaagagaatcgagaagatcaagcaggagcacgagaccagctggcactacgaccaggatcacccatataagacatgggcctaccacggctcttatgagaccaagcagacaggcagcgcctcctctatggtgaacggcgtggtgagactgctgaccaagccctgggacgtggtgcctatggtgacccagatggccatgacagataccacacctttcggccagcagagagtgtttaaggagaaggtggatacaaggacccaggagccaaaggagggcacaaagaagctgatgaagatcaccgccgagtggctgtggaaggagctgggcaagaagaagacccccagaatgtgcacaagggaggagttcaccagaaaggtgaggtccaatgccgccctgggcgccatctttaccgacgagaacaagtggaagtccgccagagaggccgtggaggactctaggttctgggagctggtggataaggagaggaatctgcacctggagggcaagtgcgagacctgcgtgtacaacatgatgggcaagcgcgagaagaagctgggcgagtttggcaaggccaagggcagcagagccatctggtatatgtggctgggcgccaggttcctggagtttgaggccctgggcttcctgaatgaggatcactggtttagccgggagaacagcctgtccggagtggagggagagggactgcacaagctgggctacatcctgagagacgtgtccaagaaggagggcggcgccatgtatgcagacgataccgcaggatgggacaccaggatcacactggaggatctgaagaatgaggagatggtgaccaaccacatggagggcgagcacaagaagctggccgaggccatcttcaagctgacataccagaataaggtggtgcgcgtgcagaggccaacccccaggggcacagtgatggacatcatcagcaggcgcgatcagaggggctccggacaagtgggcacctatggcctgaatacattcaccaacatggaggcccagctgatccggcagatggagggcgagggcgtgtttaagtccatccagcacctgacaatcaccgaggagatcgccgtgcagaactggctggcccgcgtgggaagggagcggctgtctcggatggccatcagcggcgacgattgcgtggtgaagcctctggacgatagattcgccagcgccctgaccgccctgaatgacatgggcaagatccgcaaggacatccagcagtgggagccttctcggggctggaacgattggacacaggtgccattctgcagccaccactttcacgagctgatcatgaaggacggacgcgtgctggtggtgccatgtcggaatcaggatgagctgatcggaagagcaaggatctcccagggagcaggatggtctctgagggagaccgcctgcctgggcaagagctacgcccagatgtggtccctgatgtattttcacaggagagacctgaggctggcagcaaacgccatctgtagcgccgtgccttcccactgggtgccaacctccagaaccacatggtctatccacgccaagcacgagtggatgaccacagaggacatgctgaccgtgtggaatcgggtgtggattcaggagaacccctggatggaggataagacacctgtggagagctgggaggagatcccatacctgggcaagagggaggaccagtggtgtggctctctgatcggactgaccagccgcgccacatgggccaagaatatccaggccgccatcaaccaggtgaggtccctgatcggcaacgaggagtacaccgactatatgccctctatgaagcggttccggagggaggaggaggaggcaggcgtgctgtggtgaaaagcaaaactaacatgaaacaaggctagaagtcaggtcggattaagccatagtacggaaaaaactatgctacctgtgagccccgtccaaggacgttaaaagaagtcaggccatcataaatgccatagctggagtaaactatgcagcctgtagctccacctgagaaggtgtaaaaaatccgggaggccacaaaccatggaagctgtacgcatggcgtagtggactagcggttagaggagacccctcccttacaaatcgcagcaacaatgggggcccaaggcgagatgaagctgtagtctcgctggaaggactagaggttagaggagacccccccgaaacaaaaaacagcatattgacgctgggaaagaccagagatcctgctgtctcctcagcatcattccaggcacagaacgccagaaaatggaatggtgctgttgaatcaacaggttct

SEQ ID NO: 4 - DNA, 10176 bp, synthetic construct
  source 1..10176: mol_type = other DNA
atgaataaccaacggaaaaaggcgaaaaacacgcctttcaatatgctgaaacgcgagagaaaccgcgtgtcgactgtgcagcagctgacaaagagattcagcctgggaatgctgcagggaaggggaccactgaagctgtttatggccctggtggccttcctgcggtttctgaccatcccccctacagccggcatcctgaagagatggggcaccatcaagaagtccaaggccatcaacgtgctgcgcggctttcggaaggagatcggccggatgctgaatatcctgaaccggagaaggcgctctgccggcatgatcatcatgctgatcccaaccgtgatggccttccacctgaccacacgcaatggcgagccccacatgatcgtgtcccggcaggagaagggcaagtctctgctgtttaagacagaggacggcgtgaacatgtgcaccctgatggctatggacctgggcgagctgtgcgaggataccatcacatacaagtgtcctctgctgagacagaatgagccagaggacatcgattgctggtgtaacagcacctccacatgggtgacctacggcacctgtaccacaatgggcgagcaccggagagagaagcggagcgtggccctggtgccccacgtgggaatgggcctggagaccagaacagagacctggatgagctccgagggagcatggaagcacgtgcagcgcatcgagacatggattctgaggcaccccggcttcaccatgatggcagccatcctggcctacacaatcggcaccacacacttccagcgggccctgatctttatcctgctgacagccgtgacccctagcatgaccatgagatgcatcggcatgtccaatagggacttcgtggagggcgtgtctggaggcagctgggtggacatcgtgctggagcacggctcctgcgtgaccacaatggccaagaacaagcctaccctggactttgagctgatcaagacagaggccaagcagccagccaccctgcggaagtattgcatcgaggccaagctgaccaataccacaaccgagagccggtgtccaacacagggagagcctagcctgaacgaggagcaggacaagcggttcgtgtgcaagcacagcatggtggataggggctggggcaatggctgtggcctgttcggcaagggcggcatcgtgacctgcgccatgtttaggtgtaagaagaatatggagggcaaggtggtgcagcctgagaacctggagtacaccatcgtgatcacaccacactccggagaggagcacgcagtgggaaacgataccggcaagcacggcaaggagatcaagatcacaccacagtctagcatcaccgaggccgagctgacaggctatggcacagtgacaatggagtgcagccccaggaccggcctggacttcaatgagatggtgctgctgcagatggagaacaaggcctggctggtgcaccgccagtggtttctggacctgcctctgccctggctgcctggcgcagatacccagggcagcaattggattcagaaggagacactggtgaccttcaagaacccacacgccaagaagcaggatgtggtggtgctgggctcccaggagggagcaatgcacacagccctgaccggagccacagagatccagatgtcctctggcaacctgctgttcaccggacacctgaagtgccgcctgaggatggacaagctgcagctgaagggcatgtcttacagcatgtgcaccggcaagtttaaggtggtgaaggagatcgccgagacccagcacggcacaatcgtgatcagggtgcagtatgagggcgacggcagcccttgtaagatccccttcgagatcatggatctggagaagaggcacgtgctgggccggctgatcacagtgaatccaatcgtgaccgagaaggactctcccgtgaacatcgaggccgagccaccctttggcgatagctacatcatcatcggcgtggagcctggccagctgaagctgaattggttcaagaagggcagctccatcggccagatgtttgagacaaccatgagaggcgccaagaggatggcaatcctgggcgacaccgcatgggatttcggcagcctgggaggcgtgtttacatccatcggcaaggccctgcaccaggtgttcggagccatctatggcgccgccttttccggcgtgtcttggaccatgaagatcctgatcggcgtgatcatcacatggatcggcatgaactccagatctaccagcctgtccgtgacactggtgctggtgggcatcgtgaccctgtacctgggcgtgatggtgcaggccgattctggctgcgtggtgagctggaagaataaggagctgaagtgtggctccggcatcttcatcacagacaacgtgcacacatggaccgagcagtataagtttcagcctgagtctccaagcaagctggcctctgccatccagaaggcacacgaggagggcatctgcggcatccgcagcgtgacccggctggagaatctgatgtggaagcagatcacacccgagctgaatcacatcctgtccgagaacgaggtgaagctgaccatcatgacaggcgacatcaagggcatcatgcaggccggcaagagatctctgaggccccagcctacagagctgaagtacagctggaagacctggggcaaggccaagatgctgagcacagagtcccacaaccagaccttcctgatcgatggccccgagacagccgagtgccctaataccaacagggcctggaacagcctggaggtggaggactacggcttcggcgtgtttacaaccaacatctggctgaagctgaaggagaagcaggacgtgttctgtgatagcaagctgatgtccgccgccatcaaggacaatcgcgccgtgcacgccgatatgggctattggatcgagagcgccctgaacgacacctggaagatcgagaaggcctcctttatcgaggtgaagaattgtcactggcctaagtcccacacactgtggtctaacggcgtgctggagtccgagatgatcatcccaaagaatctggccggccccgtgtctcagcacaactaccggcctggctatcacacccagatcacaggcccctggcacctgggcaagctggagatggacttcgatttttgcgacggcacaaccgtggtggtgaccgaggattgtggcaacagaggcccatctctgaggacaaccacagccagcggcaagctgatcacagagtggtgctgtcggagctgcaccctgcctccactgagatacaggggcgaggatggctgttggtatggcatggagatcagacccctgaaggagaaggaggagaatctggtgaacagcctggtgaccgcaggccacggccaggtggacaatttctccctgggcgtgctgggcatggccctgtttctggaggagatgctgcgcaccagagtgggcacaaagcacgccatcctgctggtggccgtgtccttcgtgaccctgatcacaggcaacatgtcttttagagacctgggcagagtgatggtcatggtgggcgccacaatgaccgacgacatcggcatgggagtgacctacctggccctgctggcagccttcaaggtgcgcccaacctttgccgcaggactgctgctgaggaagctgacatccaaggagctgatgatgaccacaatcggcatcgtgctgctgtcccagtctaccatccccgagacaatcctggagctgaccgatgcactggccctgggcatgatggtgctgaagatggtgagaaatatggagaagtatcagctggccgtgaccatcatggccatcctgtgcgtgcccaatgccgtgatcctgcagaacgcctggaaggtgagctgtacaatcctggccgtggtgagcgtgtcccctctgctgctgacatctagccagcagaagaccgactggattcccctggccctgacaatcaagggcctgaaccctaccgccatcttcctgaccacactgtctcgcaccagcaagaagcggagctggcccctgaatgaggccatcatggccgtgggcatggtgtccatcctggcctcctctctgctgaagaacgacatccctatgaccggaccactggtggcaggaggactgctgacagtgtgctacgtgctgaccggcagatccgccgacctggagctggagagggcagcagacgtgaagtgggaggatcaggccgagatctctggcagctcccccatcctgtctatcaccatcagcgaggacggctctatgagcatcaagaacgaggaggaggagcagacactgaccatcctgatcaggaccggcctgctggtcatcagcggcctgttccccgtgtccatccctatcacagctgccgcctggtacctgtgggaggtgaagaagcagagggcaggcgtgctgtgggacgtgccttctccccctccaatgggcaaggccgagctggaggatggcgcctatcgcatcaagcagaagggcatcctgggatacagccagatcggagcaggcgtgtataaggagggcacctttcacacaatgtggcacgtgaccagaggcgccgtgctgatgcacaagggcaagaggatcgagcctagctgggccgacgtgaagaaggatctgatctcctacggcggaggatggaagctggagggagagtggaaggagggagaggaggtgcaggtgctggccctggagccaggcaagaatcccagagccgtgcagaccaagccaggcctgttcaagaccaacgcaggcacaatcggagccgtgtccctggacttttctcctggcacatccggctctccaatcatcgataagaagggcaaggtggtgggcctgtacggaaatggagtggtgacccggagcggagcctacgtgagcgccatcgcccagacagagaagtccatcgaggacaaccccgagatcgaggacgacatcttccggaagaggcgcctgaccatcatggatctgcacccaggcgccggcaagacaaagagatacctgccagcaatcgtgcgggaggccatcaagaggggactgcggacactgatcctggcacctaccagggtggtggcagcagagatggaggaggccctgagaggcctgcccatcaggtatcagacacctgccatcagagccgagcacaccggcagggagatcgtggacctgatgtgccacgccacattcaccatgaggctgctgagccctgtgcgggtgccaaattacaacctgatcatcatggacgaggcccactttaccgatccagcctctatcgccgccagaggctatatcagcacaagggtggagatgggagaggcagcaggaatcttcatgacagcaaccccccctggctcccgcgacccatttccccagtctaatgcccccatcatcgatgaggagcgcgagatccctgagcggtcctggaactctggccacgagtgggtgacagacttcaagggcaagaccgtgtggtttgtgccctccatcaaggccggcaatgacatcgccgcctgcctgagaaagaacggcaagaaagtgatccagctgtctaggaagaccttcgacagcgagtacgtgaagacacgcaccaatgactgggatttcgtggtgaccacagacatcagcgagatgggcgccaactttaaggccgagagagtgatcgacccacggagatgtatgaagcccgtgatcctgaccgatggcgaggagagagtgatcctggccggccctatgccagtgacacactctagcgccgcacagaggcgcggcagaatcggaaggaatcccaagaatgagaacgatcagtacatctatatgggcgagcctctggagaacgacgaggattgcgcccactggaaggaggccaagatgctgctggacaatatcaacaccccagagggcatcatccccagcatgttcgagcctgagagggagaaggtggacgccatcgatggagagtacagactgaggggagaggcaaggaagacatttgtggacctgatgaggagaggcgatctgcccgtgtggctggcatacagggtggcagccgagggcatcaattatgccgacaggcgctggtgtttcgatggcgtgaagaacaatcagatcctggaggagaacgtggaggtggagatctggaccaaggagggcgagaggaagaagctgaagcccagatggctggacgccaggatctactctgatcctctggccctgaaggagttcaaggagtttgcagcaggaaggaagagcctgaccctgaacctgatcacagagatgggccgcctgcctacctttatgacacagaaggccagagacgccctggataatctggccgtgctgcacaccgcagaggcaggcggcagagcatataaccacgccctgtctgagctgccagagaccctggagacactgctgctgctgacactgctggccacagtgaccggcggcatcttcctgtttctgatgagcggcagaggcatcggcaagatgacactgggcatgtgctgtatcatcaccgccagcatcctgctgtggtacgcccagatccagccacactggatcgccgcctccatcatcctggagttctttctgatcgtgctgctgatccccgagcctgagaagcagcggacaccccaggataatcagctgacctacgtggtcatcgccatcctgaccgtggtggccgccacaatggccaacgagatgggcttcctggagaagaccaagaaggacctgggactgggctccatcgcaacacagcagccagagtctaacatcctggacatcgatctgaggccagcaagcgcctggaccctgtacgcagtggccaccacatttgtgacacccatgctgcgccactccatcgagaacagcagcgtgaacgtgtctctgacagccatcgccaatcaggcaaccgtgctgatgggactgggcaagggatggccactgtccaagatggacatcggcgtgcccctgctggcaatcggatgctactctcaggtgaaccccatcacactgaccgccgccctgttcctgctggtggcacactatgccatcatcggccctggcctgcaggccaaggccacccgcgaggcacagaagagggctgccgccggcatcatgaagaatcccaccgtggacggcatcacagtgatcgacctggaccccatcccctacgatcctaagttcgagaagcagctgggccaggtcatgctgctggtgctgtgcgtgacccaggtgctgatgatgaggaccacatgggcactgtgcgaggccctgaccctggcaacaggccctatctccacactgtgggagggcaatccaggcaggttttggaacaccacaatcgccgtgagcatggccaacatcttccgcggctcctacctggcaggagcaggactgctgttttctatcatgaagaataccacaaacacccggagaggcacaggcaatatcggcgagaccctgggcgagaagtggaagtctcggctgaacgccctgggcaagagcgagttccagatctataagaagtccggcatccaggaggtggaccgcaccctggcaaaggagggcatcaagaggggagagacagatcaccacgccgtgagcagaggctccgccaagctgagatggtttgtggagaggaacatggtgacccccgagggcaaggtggtggatctgggatgcggccggggaggctggagctactattgtggaggcctgaagaatgtgagagaggtgaagggactgaccaagggaggccctggccacgaggagcctatcccaatgtccacatacggctggaacctggtgcgcctgcagtctggcgtggacgtgttctttatcccacccgagaagtgcgacaccctgctgtgcgacatcggcgagagctcccccaatcctacagtggaggcaggacgcaccctgcgggtgctgaatctggtggagaactggctgaacaataacacccagttctgcatcaaggtgctgaacccctacatgccttccgtgatcgagaagatggaggccctgcagaggaagtatggcggcgccctggtgcgcaatcctctgtctcggaacagcacccacgagatgtattgggtgtccaatgcctctggcaacatcgtgtctagcgtgaatatgatcagccgcatgctgatcaaccgctttacaatgcggtacaagaaggccacctatgagccagacgtggatctgggcagcggcacccggaatatcggcatcgagtccgagatccccaacctggacatcatcggcaagagaatcgagaagatcaagcaggagcacgagaccagctggcactacgaccaggatcacccatataagacatgggcctaccacggctcttatgagaccaagcagacaggcagcgcctcctctatggtgaacggcgtggtgagactgctgaccaagccctgggacgtggtgcctatggtgacccagatggccatgacagataccacacctttcggccagcagagagtgtttaaggagaaggtggatacaaggacccaggagccaaaggagggcacaaagaagctgatgaagatcaccgccgagtggctgtggaaggagctgggcaagaagaagacccccagaatgtgcacaagggaggagttcaccagaaaggtgaggtccaatgccgccctgggcgccatctttaccgacgagaacaagtggaagtccgccagagaggccgtggaggactctaggttctgggagctggtggataaggagaggaatctgcacctggagggcaagtgcgagacctgcgtgtacaacatgatgggcaagcgcgagaagaagctgggcgagtttggcaaggccaagggcagcagagccatctggtatatgtggctgggcgccaggttcctggagtttgaggccctgggcttcctgaatgaggatcactggtttagccgggagaacagcctgtccggagtggagggagagggactgcacaagctgggctacatcctgagagacgtgtccaagaaggagggcggcgccatgtatgcagacgataccgcaggatgggacaccaggatcacactggaggatctgaagaatgaggagatggtgaccaaccacatggagggcgagcacaagaagctggccgaggccatcttcaagctgacataccagaataaggtggtgcgcgtgcagaggccaacccccaggggcacagtgatggacatcatcagcaggcgcgatcagaggggctccggacaagtgggcacctatggcctgaatacattcaccaacatggaggcccagctgatccggcagatggagggcgagggcgtgtttaagtccatccagcacctgacaatcaccgaggagatcgccgtgcagaactggctggcccgcgtgggaagggagcggctgtctcggatggccatcagcggcgacgattgcgtggtgaagcctctggacgatagattcgccagcgccctgaccgccctgaatgacatgggcaagatccgcaaggacatccagcagtgggagccttctcggggctggaacgattggacacaggtgccattctgcagccaccactttcacgagctgatcatgaaggacggacgcgtgctggtggtgccatgtcggaatcaggatgagctgatcggaagagcaaggatctcccagggagcaggatggtctctgagggagaccgcctgcctgggcaagagctacgcccagatgtggtccctgatgtattttcacaggagagacctgaggctggcagcaaacgccatctgtagcgccgtgccttcccactgggtgccaacctccagaaccacatggtctatccacgccaagcacgagtggatgaccacagaggacatgctgaccgtgtggaatcgggtgtggattcaggagaacccctggatggaggataagacacctgtggagagctgggaggagatcccatacctgggcaagagggaggaccagtggtgtggctctctgatcggactgaccagccgcgccacatgggccaagaatatccaggccgccatcaaccaggtgaggtccctgatcggcaacgaggagtacaccgactatatgccctctatgaagcggttccggagggaggaggaggaggcaggcgtgctgtggtga

SEQ ID NO: 5 - DNA, 10723 bp, synthetic construct
  source 1..10723: mol_type = other DNA
agttgttagtctacgtggaccgacaaagacagattctttgagggagctaagctcaacgtagttctaacagttttttaattagagagcagatctctgatgaataaccaacggaaaaaggcgaaaaacacgcctttcaatatgctgaaacgcgagagaaaccgcgtgtcgactgtgcagcagctgacaaagagattcagcctgggaatgctgcagggaaggggaccactgaagctgtttatggccctggtggccttcctgcggtttctgaccatcccccctacagccggcatcctgaagagatggggcaccatcaagaagtccaaggccatcaacgtgctgcgcggctttcggaaggagatcggccggatgctgaatatcctgaaccggagaaggcgctctgccggcatgatcatcatgctgatcccaaccgtgatggccttccacctgaccacacgcaatggcgagccccacatgatcgtgtcccggcaggagaagggcaagtctctgctgtttaagacagaggacggcgtgaacatgtgcaccctgatggctatggacctgggcgagctgtgcgaggataccatcacatacaagtgtcctctgctgagacagaatgagccagaggacatcgattgctggtgtaacagcacctccacatgggtgacctacggcacctgtaccacaatgggcgagcaccggagagagaagcggagcgtggccctggtgccccacgtgggaatgggcctggagaccagaacagagacctggatgagctccgagggagcatggaagcacgtgcagcgcatcgagacatggattctgaggcaccccggcttcaccatgatggcagccatcctggcctacacaatcggcaccacacacttccagcgggccctgatctttatcctgctgacagccgtgacccctagcatgaccatgagatgcatcggcatgtccaatagggacttcgtggagggcgtgtctggaggcagctgggtggacatcgtgctggagcacggctcctgcgtgaccacaatggccaagaacaagcctaccctggactttgagctgatcaagacagaggccaagcagccagccaccctgcggaagtattgcatcgaggccaagctgaccaataccacaaccgagagccggtgtccaacacagggagagcctagcctgaacgaggagcaggacaagcggttcgtgtgcaagcacagcatggtggataggggctggggcaatggctgtggcctgttcggcaagggcggcatcgtgacctgcgccatgtttaggtgtaagaagaatatggagggcaaggtggtgcagcctgagaacctggagtacaccatcgtgatcacaccacactccggagaggagcacgcagtgggaaacgataccggcaagcacggcaaggagatcaagatcacaccacagtctagcatcaccgaggccgagctgacaggctatggcacagtgacaatggagtgcagccccaggaccggcctggacttcaatgagatggtgctgctgcagatggagaacaaggcctggctggtgcaccgccagtggtttctggacctgcctctgccctggctgcctggcgcagatacccagggcagcaattggattcagaaggagacactggtgaccttcaagaacccacacgccaagaagcaggatgtggtggtgctgggctcccaggagggagcaatgcacacagccctgaccggagccacagagatccagatgtcctctggcaacctgctgttcaccggacacctgaagtgccgcctgaggatggacaagctgcagctgaagggcatgtcttacagcatgtgcaccggcaagtttaaggtggtgaaggagatcgccgagacccagcacggcacaatcgtgatcagggtgcagtatgagggcgacggcagcccttgtaagatccccttcgagatcatggatctggagaagaggcacgtgctgggccggctgatcacagtgaatccaatcgtgaccgagaaggactctcccgtgaacatcgaggccgagccaccctttggcgatagctacatcatcatcggcgtggagcctggccagctgaagctgaattggttcaagaagggcagctccatcggccagatgtttgagacaaccatgagaggcgccaagaggatggcaatcctgggcgacaccgcatgggatttcggcagcctgggaggcgtgtttacatccatcggcaaggccctgcaccaggtgttcggagccatctatggcgccgccttttccggcgtgtcttggaccatgaagatcctgatcggcgtgatcatcacatggatcggcatgaactcccgcagcacctcactgtctgtgacactagtattggtgggaattgtgacactgtatttgggagtcatggtgcaggccgatagtggttgcgttgtgagctggaaaaacaaagaacttaagtgtggcagtgggattttcatcacagacaacgtgcacacatggacagaacaatacaagttccaaccagaatccccttcaaaactagcttcagctatccagaaagcccatgaagagggcatttgtggaatccgctcagtaacaagactggagaatctgatgtggaaacaaataacaccagaattgaatcacattctatcagaaaatgaggtgaagttaactattatgacaggagacatcaaaggaatcatgcaggcaggaaaacgatctctgcggcctcagcccactgagctgaagtattcatggaaaacatggggcaaagcaaaaatgctctctacagagtctcataaccagacctttctcattgatggccccgaaacagcagaatgccccaacacaaatagagcttggaattcgttggaagttgaagactatggctttggagtattcaccaccaatatatggctaaaattgaaagaaaaacaggatgtattctgcgactcaaaactcatgtcagcggccataaaagacaacagagccgtccatgccgatatgggttattggatagaaagtgcactcaatgacacatggaagatagagaaagcctctttcattgaagttaaaaactgccactggccaaaatcacacaccctctggagcaatggagtgctagaaagtgagatgataattccaaagaatctcgctggaccagtgtctcaacacaactatagaccaggctaccatacacaaataacaggaccatggcatctaggtaagcttgagatggactttgatttctgtgatggaacaacagtggtagtgactgaggactgcggaaatagaggaccctctttgagaacaaccactgcctctggaaaactcataacagaatggtgctgccgatcttgcacattaccaccgctaagatacagaggtgaggatgggtgctggtacgggatggaaatcagaccattgaaggagaaagaagagaatttggtcaactccttggtcacagctggacatgggcaggtcgacaacttttcactaggagtcttgggaatggcattgttcctggaggaaatgcttaggacccgagtaggaacgaaacatgcaatactactagttgcagtttcttttgtgacattgatcacagggaacatgtcctttagagacctgggaagagtgatggttatggtaggcgccactatgacggatgacataggtatgggcgtgacttatcttgccctactagcagccttcaaagtcagaccaacttttgcagctggactactcttgagaaagctgacctccaaggaattgatgatgactactataggaattgtactcctctcccagagcaccataccagagaccattcttgagttgactgatgcgttagccttaggcatgatggtcctcaaaatggtgagaaatatggaaaagtatcaattggcagtgactatcatggctatcttgtgcgtcccaaacgcagtgatattacaaaacgcatggaaagtgagttgcacaatattggcagtggtgtccgtttccccactgctcttaacatcctcacaacagaaaacggattggataccattagcattgacgatcaaaggtctcaatccaacagctatttttctaacaaccctctcaagaaccagcaagaaaaggagctggccattaaatgaggctatcatggcagtcgggatggtgagcattttagccagttctctcctaaaaaatgatattcccatgacaggaccattagtggctggagggctcctcactgtgtgctacgtgctcactggacgatcggccgatttggaactggagagagcagccgatgtcaaatgggaagaccaggcagagatatcaggaagcagtccaatcctgtcaataacaatatcagaagatggtagcatgtcgataaaaaatgaagaggaagaacaaacactgaccatactcattagaacaggattgctggtgatctcaggactttttcctgtatcaataccaatcacggcagcagcatggtacctgtgggaagtgaagaaacaacgggccggagtattgtgggatgttccttcacccccacccatgggaaaggctgaactggaagatggagcctatagaattaagcaaaaagggattcttggatattcccagatcggagccggagtttacaaagaaggaacattccatacaatgtggcatgtcacacgtggcgctgttctaatgcataaaggaaagaggattgaaccatcatgggcggacgtcaagaaagacctaatatcatatggaggaggctggaagttagaaggagaatggaaggaaggagaagaagtccaggtattggcactggagcctggaaaaaatccaagagccgtccaaacgaaacctggtcttttcaaaaccaacgccggaacaataggtgctgtatctctggacttttctcctggaacgtcaggatctccaattatcgacaaaaaaggaaaagttgtgggtctttatggtaatggtgttgttacaaggagtggagcatatgtgagtgctatagcccagactgaaaaaagcattgaagacaacccagagatcgaagatgacattttccgaaagagaagactgaccatcatggacctccacccaggagcgggaaagacgaagagataccttccggccatagtcagagaagctataaaacggggtttgagaacattaatcttggcccccactagagttgtggcagctgaaatggaggaagcccttagaggacttccaataagataccagaccccagccatcagagctgagcacaccgggcgggagattgtggacctaatgtgtcatgccacatttaccatgaggctgctatcaccagttagagtgccaaactacaacctgattatcatggacgaagcccatttcacagacccagcaagtatagcagctagaggatacatctcaactcgagtggagatgggtgaggcagctgggatttttatgacagccactcccccgggaagcagagacccatttcctcagagcaatgcaccaatcatagatgaagaaagagaaatccctgaacgttcgtggaattccggacatgaatgggtcacggattttaaagggaagactgtttggttcgttccaagtataaaagcaggaaatgatatagcagcttgcctgaggaaaaatggaaagaaagtgatacaactcagtaggaagacctttgattctgagtatgtcaagactagaaccaatgattgggacttcgtggttacaactgacatttcagaaatgggtgccaatttcaaggctgagagggttatagaccccagacgctgcatgaaaccagtcatactaacagatggtgaagagcgggtgattctggcaggacctatgccagtgacccactctagtgcagcacaaagaagagggagaataggaagaaatccaaaaaatgagaatgaccagtacatatacatgggggaacctctggaaaatgatgaagactgtgcacactggaaagaagctaaaatgctcctagataacatcaacacgccagaaggaatcattcctagcatgttcgaaccagagcgtgaaaaggtggatgccattgatggcgaataccgcttgagaggagaagcaaggaaaacctttgtagacttaatgagaagaggagacctaccagtctggttggcctacagagtggcagctgaaggcatcaactacgcagacagaaggtggtgttttgatggagtcaagaacaaccaaatcctagaagaaaacgtggaagttgaaatctggacaaaagaaggggaaaggaagaaattgaaacccagatggttggatgctaggatctattctgacccactggcgctaaaagaatttaaggaatttgcagccggaagaaagtctctgaccctgaacctaatcacagaaatgggtaggctcccaaccttcatgactcagaaggcaagagacgcactggacaacttagcagtgctgcacacggctgaggcaggtggaagggcgtacaaccatgctctcagtgaactgccggagaccctggagacattgcttttactgacacttctggctacagtcacgggagggatctttttattcttgatgagcggaaggggcatagggaagatgaccctgggaatgtgctgcataatcacggctagcatcctcctatggtacgcacaaatacagccacactggatagcagcttcaataatactggagttttttctcatagttttgcttattccagaacctgaaaaacagagaacaccccaagacaaccaactgacctacgttgtcatagccatcctcacagtggtggccgcaaccatggcaaacgagatgggtttcctagaaaaaacgaagaaagatctcggattgggaagcattgcaacccagcaacccgagagcaacatcctggacatagatctacgtcctgcatcagcatggacgctgtatgccgtggccacaacatttgttacaccaatgttgagacatagcattgaaaattcctcagtgaatgtgtccctaacagctatagccaaccaagccacagtgttaatgggtctcgggaaaggatggccattgtcaaagatggacatcggagttccccttctcgccattggatgctactcacaagtcaaccccataactctcacagcagctcttttcttattggtagcacattatgccatcatagggccaggactccaagcaaaagcaaccagagaagctcagaaaagagcagcggcgggcatcatgaaaaacccaactgtcgatggaataacagtgattgacctagatccaataccttatgatccaaagtttgaaaagcagttgggacaagtaatgctcctagtcctctgcgtgactcaagtattgatgatgaggactacatgggctctgtgtgaggctttaaccttagctaccgggcccatctccacattgtgggaaggaaatccagggaggttttggaacaccaccattgcggtgtcaatggctaacatttttagagggagttacttggccggagctggacttctcttttctattatgaagaacacaaccaacacaagaaggggaactggcaacataggagagacgcttggagagaaatggaaaagccgattgaacgcattgggaaaaagtgaattccagatctacaagaaaagtggaatccaggaagtggatagaaccttagcaaaagaaggcattaaaagaggagaaacggaccatcacgctgtgtcgcgaggctcagcaaaactgagatggttcgttgagagaaacatggtcacaccagaagggaaagtagtggacctcggttgtggcagaggaggctggtcatactattgtggaggactaaagaatgtaagagaagtcaaaggcctaacaaaaggaggaccaggacacgaagaacccatccccatgtcaacatatgggtggaatctagtgcgtcttcaaagtggagttgacgttttcttcatcccgccagaaaagtgtgacacattattgtgtgacataggggagtcatcaccaaatcccacagtggaagcaggacgaacactcagagtccttaacttagtagaaaattggttgaacaacaacactcaattttgcataaaggttctcaacccatatatgccctcagttatagaaaaaatggaagcactacaaaggaaatatggaggagccttagtgaggaatccactctcacgaaactccacacatgagatgtactgggtatccaatgcttccgggaacatagtgtcatcagtgaacatgatttcaaggatgttgatcaacagatttacaatgagatacaagaaagccacttacgagccggatgttgacctcggaagcggaacccgtaacatcgggattgaaagtgagataccaaacctagatataattgggaaaagaatagaaaaaataaagcaagagcatgaaacatcatggcactatgaccaagaccacccatacaaaacgtgggcataccatggtagctatgaaacaaaacagactggatcagcatcatccatggtcaacggagtggtcaggctgctgacaaaaccttgggacgtcgtccccatggtgacacagatggcaatgacagacacgactccatttggacaacagcgcgtttttaaagagaaagtggacacgagaacccaagaaccgaaagaaggcacgaagaaactaatgaaaataacagcagagtggctttggaaagaattagggaagaaaaagacacccaggatgtgcaccagagaagaattcacaagaaaggtgagaagcaatgcagccttgggggccatattcactgatgagaacaagtggaagtcggcacgtgaggctgttgaagatagtaggttttgggagctggttgacaaggaaaggaatctccatcttgaaggaaagtgtgaaacatgtgtgtacaacatgatgggaaaaagagagaagaagctaggggaattcggcaaggcaaaaggcagcagagccatatggtacatgtggcttggagcacgcttcttagagtttgaagccctaggattcttaaatgaagatcactggttctccagagagaactccctgagtggagtggaaggagaagggctgcacaagctaggttacattctaagagacgtgagcaagaaagagggaggagcaatgtatgccgatgacaccgcaggatgggatacaagaatcacactagaagacctaaaaaatgaagaaatggtaacaaaccacatggaaggagaacacaagaaactagccgaggccattttcaaactaacgtaccaaaacaaggtggtgcgtgtgcaaagaccaacaccaagaggcacagtaatggacatcatatcgagaagagaccaaagaggtagtggacaagttggcacctatggactcaatactttcaccaatatggaagcccaactaatcagacagatggagggagaaggagtctttaaaagcattcagcacctaacaatcacagaagaaatcgctgtgcaaaactggttagcaagagtggggcgcgaaaggttatcaagaatggccatcagtggagatgattgtgttgtgaaacctttagatgacaggttcgcaagcgctttaacagctctaaatgacatgggaaagattaggaaagacatacaacaatgggaaccttcaagaggatggaatgattggacacaagtgcccttctgttcacaccatttccatgagttaatcatgaaagacggtcgcgtactcgttgttccatgtagaaaccaagatgaactgattggcagagcccgaatctcccaaggagcagggtggtctttgcgggagacggcctgtttggggaagtcttacgcccaaatgtggagcttgatgtacttccacagacgcgacctcaggctggcggcaaatgctatttgctcggcagtaccatcacattgggttccaacaagtcgaacaacctggtccatacatgctaaacatgaatggatgacaacggaagacatgctgacagtctggaacagggtgtggattcaagaaaacccatggatggaagacaaaactccagtggaatcatgggaggaaatcccatacttggggaaaagagaagaccaatggtgcggctcattgattgggttaacaagcagggccacctgggcaaagaacatccaagcagcaataaatcaagttagatcccttataggcaatgaagaatacacagattacatgccatccatgaaaagattcagaagagaagaggaagaagcaggagttctgtggtagaaagcaaaactaacatgaaacaaggctagaagtcaggtcggattaagccatagtacggaaaaaactatgctacctgtgagccccgtccaaggacgttaaaagaagtcaggccatcataaatgccatagctggagtaaactatgcagcctgtagctccacctgagaaggtgtaaaaaatccgggaggccacaaaccatggaagctgtacgcatggcgtagtggactagcggttagaggagacccctcccttacaaatcgcagcaacaatgggggcccaaggcgagatgaagctgtagtctcgctggaaggactagaggttagaggagacccccccgaaacaaaaaacagcatattgacgctgggaaagaccagagatcctgctgtctcctcagcatcattccaggcacagaacgccagaaaatggaatggtgctgttgaatcaacaggttct

SEQ ID NO: 6 - DNA, 10176 bp, synthetic construct
  source 1..10176: mol_type = other DNA
atgaataaccaacggaaaaaggcgaaaaacacgcctttcaatatgctgaaacgcgagagaaaccgcgtgtcgactgtgcagcagctgacaaagagattcagcctgggaatgctgcagggaaggggaccactgaagctgtttatggccctggtggccttcctgcggtttctgaccatcccccctacagccggcatcctgaagagatggggcaccatcaagaagtccaaggccatcaacgtgctgcgcggctttcggaaggagatcggccggatgctgaatatcctgaaccggagaaggcgctctgccggcatgatcatcatgctgatcccaaccgtgatggccttccacctgaccacacgcaatggcgagccccacatgatcgtgtcccggcaggagaagggcaagtctctgctgtttaagacagaggacggcgtgaacatgtgcaccctgatggctatggacctgggcgagctgtgcgaggataccatcacatacaagtgtcctctgctgagacagaatgagccagaggacatcgattgctggtgtaacagcacctccacatgggtgacctacggcacctgtaccacaatgggcgagcaccggagagagaagcggagcgtggccctggtgccccacgtgggaatgggcctggagaccagaacagagacctggatgagctccgagggagcatggaagcacgtgcagcgcatcgagacatggattctgaggcaccccggcttcaccatgatggcagccatcctggcctacacaatcggcaccacacacttccagcgggccctgatctttatcctgctgacagccgtgacccctagcatgaccatgagatgcatcggcatgtccaatagggacttcgtggagggcgtgtctggaggcagctgggtggacatcgtgctggagcacggctcctgcgtgaccacaatggccaagaacaagcctaccctggactttgagctgatcaagacagaggccaagcagccagccaccctgcggaagtattgcatcgaggccaagctgaccaataccacaaccgagagccggtgtccaacacagggagagcctagcctgaacgaggagcaggacaagcggttcgtgtgcaagcacagcatggtggataggggctggggcaatggctgtggcctgttcggcaagggcggcatcgtgacctgcgccatgtttaggtgtaagaagaatatggagggcaaggtggtgcagcctgagaacctggagtacaccatcgtgatcacaccacactccggagaggagcacgcagtgggaaacgataccggcaagcacggcaaggagatcaagatcacaccacagtctagcatcaccgaggccgagctgacaggctatggcacagtgacaatggagtgcagccccaggaccggcctggacttcaatgagatggtgctgctgcagatggagaacaaggcctggctggtgcaccgccagtggtttctggacctgcctctgccctggctgcctggcgcagatacccagggcagcaattggattcagaaggagacactggtgaccttcaagaacccacacgccaagaagcaggatgtggtggtgctgggctcccaggagggagcaatgcacacagccctgaccggagccacagagatccagatgtcctctggcaacctgctgttcaccggacacctgaagtgccgcctgaggatggacaagctgcagctgaagggcatgtcttacagcatgtgcaccggcaagtttaaggtggtgaaggagatcgccgagacccagcacggcacaatcgtgatcagggtgcagtatgagggcgacggcagcccttgtaagatccccttcgagatcatggatctggagaagaggcacgtgctgggccggctgatcacagtgaatccaatcgtgaccgagaaggactctcccgtgaacatcgaggccgagccaccctttggcgatagctacatcatcatcggcgtggagcctggccagctgaagctgaattggttcaagaagggcagctccatcggccagatgtttgagacaaccatgagaggcgccaagaggatggcaatcctgggcgacaccgcatgggatttcggcagcctgggaggcgtgtttacatccatcggcaaggccctgcaccaggtgttcggagccatctatggcgccgccttttccggcgtgtcttggaccatgaagatcctgatcggcgtgatcatcacatggatcggcatgaactcccgcagcacctcactgtctgtgacactagtattggtgggaattgtgacactgtatttgggagtcatggtgcaggccgatagtggttgcgttgtgagctggaaaaacaaagaacttaagtgtggcagtgggattttcatcacagacaacgtgcacacatggacagaacaatacaagttccaaccagaatccccttcaaaactagcttcagctatccagaaagcccatgaagagggcatttgtggaatccgctcagtaacaagactggagaatctgatgtggaaacaaataacaccagaattgaatcacattctatcagaaaatgaggtgaagttaactattatgacaggagacatcaaaggaatcatgcaggcaggaaaacgatctctgcggcctcagcccactgagctgaagtattcatggaaaacatggggcaaagcaaaaatgctctctacagagtctcataaccagacctttctcattgatggccccgaaacagcagaatgccccaacacaaatagagcttggaattcgttggaagttgaagactatggctttggagtattcaccaccaatatatggctaaaattgaaagaaaaacaggatgtattctgcgactcaaaactcatgtcagcggccataaaagacaacagagccgtccatgccgatatgggttattggatagaaagtgcactcaatgacacatggaagatagagaaagcctctttcattgaagttaaaaactgccactggccaaaatcacacaccctctggagcaatggagtgctagaaagtgagatgataattccaaagaatctcgctggaccagtgtctcaacacaactatagaccaggctaccatacacaaataacaggaccatggcatctaggtaagcttgagatggactttgatttctgtgatggaacaacagtggtagtgactgaggactgcggaaatagaggaccctctttgagaacaaccactgcctctggaaaactcataacagaatggtgctgccgatcttgcacattaccaccgctaagatacagaggtgaggatgggtgctggtacgggatggaaatcagaccattgaaggagaaagaagagaatttggtcaactccttggtcacagctggacatgggcaggtcgacaacttttcactaggagtcttgggaatggcattgttcctggaggaaatgcttaggacccgagtaggaacgaaacatgcaatactactagttgcagtttcttttgtgacattgatcacagggaacatgtcctttagagacctgggaagagtgatggttatggtaggcgccactatgacggatgacataggtatgggcgtgacttatcttgccctactagcagccttcaaagtcagaccaacttttgcagctggactactcttgagaaagctgacctccaaggaattgatgatgactactataggaattgtactcctctcccagagcaccataccagagaccattcttgagttgactgatgcgttagccttaggcatgatggtcctcaaaatggtgagaaatatggaaaagtatcaattggcagtgactatcatggctatcttgtgcgtcccaaacgcagtgatattacaaaacgcatggaaagtgagttgcacaatattggcagtggtgtccgtttccccactgctcttaacatcctcacaacagaaaacggattggataccattagcattgacgatcaaaggtctcaatccaacagctatttttctaacaaccctctcaagaaccagcaagaaaaggagctggccattaaatgaggctatcatggcagtcgggatggtgagcattttagccagttctctcctaaaaaatgatattcccatgacaggaccattagtggctggagggctcctcactgtgtgctacgtgctcactggacgatcggccgatttggaactggagagagcagccgatgtcaaatgggaagaccaggcagagatatcaggaagcagtccaatcctgtcaataacaatatcagaagatggtagcatgtcgataaaaaatgaagaggaagaacaaacactgaccatactcattagaacaggattgctggtgatctcaggactttttcctgtatcaataccaatcacggcagcagcatggtacctgtgggaagtgaagaaacaacgggccggagtattgtgggatgttccttcacccccacccatgggaaaggctgaactggaagatggagcctatagaattaagcaaaaagggattcttggatattcccagatcggagccggagtttacaaagaaggaacattccatacaatgtggcatgtcacacgtggcgctgttctaatgcataaaggaaagaggattgaaccatcatgggcggacgtcaagaaagacctaatatcatatggaggaggctggaagttagaaggagaatggaaggaaggagaagaagtccaggtattggcactggagcctggaaaaaatccaagagccgtccaaacgaaacctggtcttttcaaaaccaacgccggaacaataggtgctgtatctctggacttttctcctggaacgtcaggatctccaattatcgacaaaaaaggaaaagttgtgggtctttatggtaatggtgttgttacaaggagtggagcatatgtgagtgctatagcccagactgaaaaaagcattgaagacaacccagagatcgaagatgacattttccgaaagagaagactgaccatcatggacctccacccaggagcgggaaagacgaagagataccttccggccatagtcagagaagctataaaacggggtttgagaacattaatcttggcccccactagagttgtggcagctgaaatggaggaagcccttagaggacttccaataagataccagaccccagccatcagagctgagcacaccgggcgggagattgtggacctaatgtgtcatgccacatttaccatgaggctgctatcaccagttagagtgccaaactacaacctgattatcatggacgaagcccatttcacagacccagcaagtatagcagctagaggatacatctcaactcgagtggagatgggtgaggcagctgggatttttatgacagccactcccccgggaagcagagacccatttcctcagagcaatgcaccaatcatagatgaagaaagagaaatccctgaacgttcgtggaattccggacatgaatgggtcacggattttaaagggaagactgtttggttcgttccaagtataaaagcaggaaatgatatagcagcttgcctgaggaaaaatggaaagaaagtgatacaactcagtaggaagacctttgattctgagtatgtcaagactagaaccaatgattgggacttcgtggttacaactgacatttcagaaatgggtgccaatttcaaggctgagagggttatagaccccagacgctgcatgaaaccagtcatactaacagatggtgaagagcgggtgattctggcaggacctatgccagtgacccactctagtgcagcacaaagaagagggagaataggaagaaatccaaaaaatgagaatgaccagtacatatacatgggggaacctctggaaaatgatgaagactgtgcacactggaaagaagctaaaatgctcctagataacatcaacacgccagaaggaatcattcctagcatgttcgaaccagagcgtgaaaaggtggatgccattgatggcgaataccgcttgagaggagaagcaaggaaaacctttgtagacttaatgagaagaggagacctaccagtctggttggcctacagagtggcagctgaaggcatcaactacgcagacagaaggtggtgttttgatggagtcaagaacaaccaaatcctagaagaaaacgtggaagttgaaatctggacaaaagaaggggaaaggaagaaattgaaacccagatggttggatgctaggatctattctgacccactggcgctaaaagaatttaaggaatttgcagccggaagaaagtctctgaccctgaacctaatcacagaaatgggtaggctcccaaccttcatgactcagaaggcaagagacgcactggacaacttagcagtgctgcacacggctgaggcaggtggaagggcgtacaaccatgctctcagtgaactgccggagaccctggagacattgcttttactgacacttctggctacagtcacgggagggatctttttattcttgatgagcggaaggggcatagggaagatgaccctgggaatgtgctgcataatcacggctagcatcctcctatggtacgcacaaatacagccacactggatagcagcttcaataatactggagttttttctcatagttttgcttattccagaacctgaaaaacagagaacaccccaagacaaccaactgacctacgttgtcatagccatcctcacagtggtggccgcaaccatggcaaacgagatgggtttcctagaaaaaacgaagaaagatctcggattgggaagcattgcaacccagcaacccgagagcaacatcctggacatagatctacgtcctgcatcagcatggacgctgtatgccgtggccacaacatttgttacaccaatgttgagacatagcattgaaaattcctcagtgaatgtgtccctaacagctatagccaaccaagccacagtgttaatgggtctcgggaaaggatggccattgtcaaagatggacatcggagttccccttctcgccattggatgctactcacaagtcaaccccataactctcacagcagctcttttcttattggtagcacattatgccatcatagggccaggactccaagcaaaagcaaccagagaagctcagaaaagagcagcggcgggcatcatgaaaaacccaactgtcgatggaataacagtgattgacctagatccaataccttatgatccaaagtttgaaaagcagttgggacaagtaatgctcctagtcctctgcgtgactcaagtattgatgatgaggactacatgggctctgtgtgaggctttaaccttagctaccgggcccatctccacattgtgggaaggaaatccagggaggttttggaacaccaccattgcggtgtcaatggctaacatttttagagggagttacttggccggagctggacttctcttttctattatgaagaacacaaccaacacaagaaggggaactggcaacataggagagacgcttggagagaaatggaaaagccgattgaacgcattgggaaaaagtgaattccagatctacaagaaaagtggaatccaggaagtggatagaaccttagcaaaagaaggcattaaaagaggagaaacggaccatcacgctgtgtcgcgaggctcagcaaaactgagatggttcgttgagagaaacatggtcacaccagaagggaaagtagtggacctcggttgtggcagaggaggctggtcatactattgtggaggactaaagaatgtaagagaagtcaaaggcctaacaaaaggaggaccaggacacgaagaacccatccccatgtcaacatatgggtggaatctagtgcgtcttcaaagtggagttgacgttttcttcatcccgccagaaaagtgtgacacattattgtgtgacataggggagtcatcaccaaatcccacagtggaagcaggacgaacactcagagtccttaacttagtagaaaattggttgaacaacaacactcaattttgcataaaggttctcaacccatatatgccctcagttatagaaaaaatggaagcactacaaaggaaatatggaggagccttagtgaggaatccactctcacgaaactccacacatgagatgtactgggtatccaatgcttccgggaacatagtgtcatcagtgaacatgatttcaaggatgttgatcaacagatttacaatgagatacaagaaagccacttacgagccggatgttgacctcggaagcggaacccgtaacatcgggattgaaagtgagataccaaacctagatataattgggaaaagaatagaaaaaataaagcaagagcatgaaacatcatggcactatgaccaagaccacccatacaaaacgtgggcataccatggtagctatgaaacaaaacagactggatcagcatcatccatggtcaacggagtggtcaggctgctgacaaaaccttgggacgtcgtccccatggtgacacagatggcaatgacagacacgactccatttggacaacagcgcgtttttaaagagaaagtggacacgagaacccaagaaccgaaagaaggcacgaagaaactaatgaaaataacagcagagtggctttggaaagaattagggaagaaaaagacacccaggatgtgcaccagagaagaattcacaagaaaggtgagaagcaatgcagccttgggggccatattcactgatgagaacaagtggaagtcggcacgtgaggctgttgaagatagtaggttttgggagctggttgacaaggaaaggaatctccatcttgaaggaaagtgtgaaacatgtgtgtacaacatgatgggaaaaagagagaagaagctaggggaattcggcaaggcaaaaggcagcagagccatatggtacatgtggcttggagcacgcttcttagagtttgaagccctaggattcttaaatgaagatcactggttctccagagagaactccctgagtggagtggaaggagaagggctgcacaagctaggttacattctaagagacgtgagcaagaaagagggaggagcaatgtatgccgatgacaccgcaggatgggatacaagaatcacactagaagacctaaaaaatgaagaaatggtaacaaaccacatggaaggagaacacaagaaactagccgaggccattttcaaactaacgtaccaaaacaaggtggtgcgtgtgcaaagaccaacaccaagaggcacagtaatggacatcatatcgagaagagaccaaagaggtagtggacaagttggcacctatggactcaatactttcaccaatatggaagcccaactaatcagacagatggagggagaaggagtctttaaaagcattcagcacctaacaatcacagaagaaatcgctgtgcaaaactggttagcaagagtggggcgcgaaaggttatcaagaatggccatcagtggagatgattgtgttgtgaaacctttagatgacaggttcgcaagcgctttaacagctctaaatgacatgggaaagattaggaaagacatacaacaatgggaaccttcaagaggatggaatgattggacacaagtgcccttctgttcacaccatttccatgagttaatcatgaaagacggtcgcgtactcgttgttccatgtagaaaccaagatgaactgattggcagagcccgaatctcccaaggagcagggtggtctttgcgggagacggcctgtttggggaagtcttacgcccaaatgtggagcttgatgtacttccacagacgcgacctcaggctggcggcaaatgctatttgctcggcagtaccatcacattgggttccaacaagtcgaacaacctggtccatacatgctaaacatgaatggatgacaacggaagacatgctgacagtctggaacagggtgtggattcaagaaaacccatggatggaagacaaaactccagtggaatcatgggaggaaatcccatacttggggaaaagagaagaccaatggtgcggctcattgattgggttaacaagcagggccacctgggcaaagaacatccaagcagcaataaatcaagttagatcccttataggcaatgaagaatacacagattacatgccatccatgaaaagattcagaagagaagaggaagaagcaggagttctgtggtag

SEQ ID NO: 7 - DNA, 10723 bp, synthetic construct
  source 1..10723: mol_type = other DNA
agttgttagtctacgtggaccgacaaagacagattctttgagggagctaagctcaacgtagttctaacagttttttaattagagagcagatctctgatgaataaccaacggaaaaaggcgaaaaacacgcctttcaatatgctgaaacgcgagagaatccgcgtgtcgactgcgcagcagctgacaaagagattcagcctgggaatgctgcagggaaggggaccactgaagctgtttatggccctggtggccttcctgcggtttctgaccatcccccctacagccggcatcctgaagagatggggcaccatcaagaagtccaaggccatcaacgtgctgcgcggctttcggaaggagatcggccggatgctgaatatcctgaaccggagaaggcgctctgccggcatgatcatcatgctgatcccaaccgtgatggccttccacctgaccacacgcaatggcgagccccacatgatcgtgtcccggcaggagaagggcaagtctctgctgtttaagacagaggacggcgtgaacatgtgcaccctgatggctatggacctgggcgagctgtgcgaggataccatcacatacaagtgtcctctgctgagacagaatgagccagaggacatcgattgctggtgtaacagcacctccacatgggtgacctacggcacctgtaccacaatgggcgagcaccggagagagaagcggagcgtggccctggtgccccacgtgggaatgggcctggagaccagaacagagacctggatgagctccgagggagcatggaagcacgtgcagcgcatcgagacatggattctgaggcaccccggcttcaccatgatggcagccatcctggcctacacaatcggcaccacacacttccagcgggccctgatctttatcctgctgacagccgtgacccctagcatgaccatgagatgcatcggcatgtccaatagggacttcgtggagggcgtgtctggaggcagctgggtggacatcgtgctggagcacggctcctgcgtgaccacaatggccaagaacaagcctaccctggactttgagctgatcaagacagaggccaagcagccagccaccctgcggaagtattgcatcgaggccaagctgaccaataccacaaccgagagccggtgtccaacacagggagagcctagcctgaacgaggagcaggacaagcggttcgtgtgcaagcacagcatggtggataggggctggggcaatggctgtggcctgttcggcaagggcggcatcgtgacctgcgccatgtttaggtgtaagaagaatatggagggcaaggtggtgcagcctgagaacctggagtacaccatcgtgatcacaccacactccggagaggagcacgcagtgggaaacgataccggcaagcacggcaaggagatcaagatcacaccacagtctagcatcaccgaggccgagctgacaggctatggcacagtgacaatggagtgcagccccaggaccggcctggacttcaatgaggtggtgctgctgcagatggagaacaaggcctggctggtgcaccgccagtggtttctggacctgcctctgccctggctgcctggcgcagatacccagggcagcaattggattcagaaggagacactggtgaccttcaagaacccacacgccaagaagcaggatgtggtggtgctgggctcccaggagggagcaatgcacacagccctgaccggagccacagagatccagatgtcctctggcaacctgctgttcaccggacacctgaagtgccgcctgaggatggacaagctgcagctgaagggcatgtcttacagcatgtgcaccggcaagtttaaggtggtgaaggagatcgccgagacccagcacggcacaatcgtgatcagggtgcagtatgagggcgacggcagcccttgtaagatccccttcgagatcatggatctggagaagaggcacgtgctgggccggctgatcacagtgaatccaatcgtgaccgagaaggactctcccgtgaacatcgaggccgagccaccctttggcgatagctacatcatcatcggcgtggagcctggccagctgaagctgaattggttcaagaagggcagctccatcggccagatgtttgagacaaccatgagaggcgccaagaggatggcaatcctgggcgacaccgcatgggatttcggcagcctgggaggcgtgtttacatccatcggcaaggccctgcaccaggtgttcggagccatctatggcgccgccttttccggcgtgtcttggaccatgaagatcctgatcggcgtgatcatcacatggatcggcatgaactcccgcagcacctcactgtctgtgacactagtattggtgggaattgtgacactgtatttgggagtcatggtgcaggccgatagtggttgcgttgtgagctggaaaaacaaagaacttaagtgtggcagtgggattttcatcacagacaacgtgcacacatggacagaacaatacaagttccaaccagaatccccttcaaaactagcttcagctatccagaaagcccatgaagagggcatttgtggaatccgctcagtaacaagactggagaatctgatgtggaaacaaataacaccagaattgaatcacattctatcagaaaatgaggtgaagttaactattatgacaggagacatcaaaggaatcatgcaggcaggaaaacgatctctgcggcctcagcccactgagctgaagtattcatggaaaacatggggcaaagcaaaaatgctctctacagagtctcataaccagacctttctcattgatggccccgaaacagcagaatgccccaacacaaatagagcttggaattcgttggaagttgaagactatggctttggagtattcaccaccaatatatggctaaaattgaaagaaaaacaggatgtattctgcgactcaaaactcatgtcagcggccataaaagacaacagagccgtccatgccgatatgggttattggatagaaagtgcactcaatgacacatggaagatagagaaagcctctttcattgaagttaaaaactgccactggccaaaatcacacaccctctggagcaatggagtgctagaaagtgagatgataattccaaagaatctcgctggaccagtgtctcaacacaactatagaccaggctaccatacacaaataacaggaccatggcatctaggtaagcttgagatggactttgatttctgtgatggaacaacagtggtagtgactgaggactgcggaaatagaggaccctctttgagaacaaccactgcctctggaaaactcataacagaatggtgctgccgatcttgcacattaccaccgctaagatacagaggtgaggatgggtgctggtacgggatggaaatcagaccattgaaggagaaagaagagaatttggtcaactccttggtcacagctggacatgggcaggtcgacaacttttcactaggagtcttgggaatggcattgttcctggaggaaatgcttaggacccgagtaggaacgaaacatgcaatactactagttgcagtttcttttgtgacattgatcacagggaacatgtcctttagagacctgggaagagtgatggttatggtaggcgccactatgacggatgacataggtatgggcgtgacttatcttgccctactagcagccttcaaagtcagaccaacttttgcagctggactactcttgagaaagctgacctccaaggaattgatgatgactactataggaattgtactcctctcccagagcaccataccagagaccattcttgagttgactgatgcgttagccttaggcatgatggtcctcaaaatggtgagaaatatggaaaagtatcaattggcagtgactatcatggctatcttgtgcgtcccaaacgcagtgatattacaaaacgcatggaaagtgagttgcacaatattggcagtggtgtccgtttccccactgctcttaacatcctcacaacagaaaacggattggataccattagcattgacgatcaaaggtctcaatccaacagctatttttctaacaaccctctcaagaaccagcaagaaaaggagctggccattaaatgaggctatcatggcagtcgggatggtgagcattttagccagttctctcctaaaaaatgatattcccatgacaggaccattagtggctggagggctcctcactgtgtgctacgtgctcactggacgatcggccgatttggaactggagagagcagccgatgtcaaatgggaagaccaggcagagatatcaggaagcagtccaatcctgtcaataacaatatcagaagatggtagcatgtcgataaaaaatgaagaggaagaacaaacactgaccatactcattagaacaggattgctggtgatctcaggactttttcctgtatcaataccaatcacggcagcagcatggtacctgtgggaagtgaagaaacaacgggccggagtattgtgggatgttccttcacccccacccatgggaaaggctgaactggaagatggagcctatagaattaagcaaaaagggattcttggatattcccagatcggagccggagtttacaaagaaggaacattccatacaatgtggcatgtcacacgtggcgctgttctaatgcataaaggaaagaggattgaaccatcatgggcggacgtcaagaaagacctaatatcatatggaggaggctggaagttagaaggagaatggaaggaaggagaagaagtccaggtattggcactggagcctggaaaaaatccaagagccgtccaaacgaaacctggtcttttcaaaaccaacgccggaacaataggtgctgtatctctggacttttctcctggaacgtcaggatctccaattatcgacaaaaaaggaaaagttgtgggtctttatggtaatggtgttgttacaaggagtggagcatatgtgagtgctatagcccagactgaaaaaagcattgaagacaacccagagatcgaagatgacattttccgaaagagaagactgaccatcatggacctccacccaggagcgggaaagacgaagagataccttccggccatagtcagagaagctataaaacggggtttgagaacattaatcttggcccccactagagttgtggcagctgaaatggaggaagcccttagaggacttccaataagataccagaccccagccatcagagctgagcacaccgggcgggagattgtggacctaatgtgtcatgccacatttaccatgaggctgctatcaccagttagagtgccaaactacaacctgattatcatggacgaagcccatttcacagacccagcaagtatagcagctagaggatacatctcaactcgagtggagatgggtgaggcagctgggatttttatgacagccactcccccgggaagcagagacccatttcctcagagcaatgcaccaatcatagatgaagaaagagaaatccctgaacgttcgtggaattccggacatgaatgggtcacggattttaaagggaagactgtttggttcgttccaagtataaaagcaggaaatgatatagcagcttgcctgaggaaaaatggaaagaaagtgatacaactcagtaggaagacctttgattctgagtatgtcaagactagaaccaatgattgggacttcgtggttacaactgacatttcagaaatgggtgccaatttcaaggctgagagggttatagaccccagacgctgcatgaaaccagtcatactaacagatggtgaagagcgggtgattctggcaggacctatgccagtgacccactctagtgcagcacaaagaagagggagaataggaagaaatccaaaaaatgagaatgaccagtacatatacatgggggaacctctggaaaatgatgaagactgtgcacactggaaagaagctaaaatgctcctagataacatcaacacgccagaaggaatcattcctagcatgttcgaaccagagcgtgaaaaggtggatgccattgatggcgaataccgcttgagaggagaagcaaggaaaacctttgtagacttaatgagaagaggagacctaccagtctggttggcctacagagtggcagctgaaggcatcaactacgcagacagaaggtggtgttttgatggagtcaagaacaaccaaatcctagaagaaaacgtggaagttgaaatctggacaaaagaaggggaaaggaagaaattgaaacccagatggttggatgctaggatctattctgacccactggcgctaaaagaatttaaggaatttgcagccggaagaaagtctctgaccctgaacctaatcacagaaatgggtaggctcccaaccttcatgactcagaaggcaagagacgcactggacaacttagcagtgctgcacacggctgaggcaggtggaagggcgtacaaccatgctctcagtgaactgccggagaccctggagacattgcttttactgacacttctggctacagtcacgggagggatctttttattcttgatgagcggaaggggcatagggaagatgaccctgggaatgtgctgcataatcacggctagcatcctcctatggtacgcacaaatacagccacactggatagcagcttcaataatactggagttttttctcatagttttgcttattccagaacctgaaaaacagagaacaccccaagacaaccaactgacctacgttgtcatagccatcctcacagtggtggccgcaaccatggcaaacgagatgggtttcctagaaaaaacgaagaaagatctcggattgggaagcattgcaacccagcaacccgagagcaacatcctggacatagatctacgtcctgcatcagcatggacgctgtatgccgtggccacaacatttgttacaccaatgttgagacatagcattgaaaattcctcagtgaatgtgtccctaacagctatagccaaccaagccacagtgttaatgggtctcgggaaaggatggccattgtcaaagatggacatcggagttccccttctcgccattggatgctactcacaagtcaaccccataactctcacagcagctcttttcttattggtagcacattatgccatcatagggccaggactccaagcaaaagcaaccagagaagctcagaaaagagcagcggcgggcatcatgaaaaacccaactgtcgatggaataacagtgattgacctagatccaataccttatgatccaaagtttgaaaagcagttgggacaagtaatgctcctagtcctctgcgtgactcaagtattgatgatgaggactacatgggctctgtgtgaggctttaaccttagctaccgggcccatctccacattgtgggaaggaaatccagggaggttttggaacaccaccattgcggtgtcaatggctaacatttttagagggagttacttggccggagctggacttctcttttctattatgaagaacacaaccaacacaagaaggggaactggcaacataggagagacgcttggagagaaatggaaaagccgattgaacgcattgggaaaaagtgaattccagatctacaagaaaagtggaatccaggaagtggatagaaccttagcaaaagaaggcattaaaagaggagaaacggaccatcacgctgtgtcgcgaggctcagcaaaactgagatggttcgttgagagaaacatggtcacaccagaagggaaagtagtggacctcggttgtggcagaggaggctggtcatactattgtggaggactaaagaatgtaagagaagtcaaaggcctaacaaaaggaggaccaggacacgaagaacccatccccatgtcaacatatgggtggaatctagtgcgtcttcaaagtggagttgacgttttcttcatcccgccagaaaagtgtgacacattattgtgtgacataggggagtcatcaccaaatcccacagtggaagcaggacgaacactcagagtccttaacttagtagaaaattggttgaacaacaacactcaattttgcataaaggttctcaacccatatatgccctcagttatagaaaaaatggaagcactacaaaggaaatatggaggagccttagtgaggaatccactctcacgaaactccacacatgagatgtactgggtatccaatgcttccgggaacatagtgtcatcagtgaacatgatttcaaggatgttgatcaacagatttacaatgagatacaagaaagccacttacgagccggatgttgacctcggaagcggaacccgtaacatcgggattgaaagtgagataccaaacctagatataattgggaaaagaatagaaaaaataaagcaagagcatgaaacatcatggcactatgaccaagaccacccatacaaaacgtgggcataccatggtagctatgaaacaaaacagactggatcagcatcatccatggtcaacggagtggtcaggctgctgacaaaaccttgggacgtcgtccccatggtgacacagatggcaatgacagacacgactccatttggacaacagcgcgtttttaaagagaaagtggacacgagaacccaagaaccgaaagaaggcacgaagaaactaatgaaaataacagcagagtggctttggaaagaattagggaagaaaaagacacccaggatgtgcaccagagaagaattcacaagaaaggtgagaagcaatgcagccttgggggccatattcactgatgagaacaagtggaagtcggcacgtgaggctgttgaagatagtaggttttgggagctggttgacaaggaaaggaatctccatcttgaaggaaagtgtgaaacatgtgtgtacaacatgatgggaaaaagagagaagaagctaggggaattcggcaaggcaaaaggcagcagagccatatggtacatgtggcttggagcacgcttcttagagtttgaagccctaggattcttaaatgaagatcactggttctccagagagaactccctgagtggagtggaaggagaagggctgcacaagctaggttacattctaagagacgtgagcaagaaagagggaggagcaatgtatgccgatgacaccgcaggatgggatacaagaatcacactagaagacctaaaaaatgaagaaatggtaacaaaccacatggaaggagaacacaagaaactagccgaggccattttcaaactaacgtaccaaaacaaggtggtgcgtgtgcaaagaccaacaccaagaggcacagtaatggacatcatatcgagaagagaccaaagaggtagtggacaagttggcacctatggactcaatactttcaccaatatggaagcccaactaatcagacagatggagggagaaggagtctttaaaagcattcagcacctaacaatcacagaagaaatcgctgtgcaaaactggttagcaagagtggggcgcgaaaggttatcaagaatggccatcagtggagatgattgtgttgtgaaacctttagatgacaggttcgcaagcgctttaacagctctaaatgacatgggaaagattaggaaagacatacaacaatgggaaccttcaagaggatggaatgattggacacaagtgcccttctgttcacaccatttccatgagttaatcatgaaagacggtcgcgtactcgttgttccatgtagaaaccaagatgaactgattggcagagcccgaatctcccaaggagcagggtggtctttgcgggagacggcctgtttggggaagtcttacgcccaaatgtggagcttgatgtacttccacagacgcgacctcaggctggcggcaaatgctatttgctcggcagtaccatcacattgggttccaacaagtcgaacaacctggtccatacatgctaaacatgaatggatgacaacggaagacatgctgacagtctggaacagggtgtggattcaagaaaacccatggatggaagacaaaactccagtggaatcatgggaggaaatcccatacttggggaaaagagaagaccaatggtgcggctcattgattgggttaacaagcagggccacctgggcaaagaacatccaagcagcaataaatcaagttagatcccttataggcaatgaagaatacacagattacatgccatccatgaaaagattcagaagagaagaggaagaagcaggagttctgtggtagaaagcaaaactaacatgaaacaaggctagaagtcaggtcggattaagccatagtacggaaaaaactatgctacctgtgagccccgtccaaggacgttaaaagaagtcaggccatcataaatgccatagctggagtaaactatgcagcctgtagctccacctgagaaggtgtaaaaaatccgggaggccacaaaccatggaagctgtacgcatggcgtagtggactagcggttagaggagacccctcccttacaaatcgcagcaacaatgggggcccaaggcgagatgaagctgtagtctcgctggaaggactagaggttagaggagacccccccgaaacaaaaaacagcatattgacgctgggaaagaccagagatcctgctgtctcctcagcatcattccaggcacagaacgccagaaaatggaatggtgctgttgaatcaacaggttct

SEQ ID NO: 8 - DNA, 10176 bp, synthetic construct
  source 1..10176: mol_type = other DNA
atgaataaccaacggaaaaaggcgaaaaacacgcctttcaatatgctgaaacgcgagagaatccgcgtgtcgactgcgcagcagctgacaaagagattcagcctgggaatgctgcagggaaggggaccactgaagctgtttatggccctggtggccttcctgcggtttctgaccatcccccctacagccggcatcctgaagagatggggcaccatcaagaagtccaaggccatcaacgtgctgcgcggctttcggaaggagatcggccggatgctgaatatcctgaaccggagaaggcgctctgccggcatgatcatcatgctgatcccaaccgtgatggccttccacctgaccacacgcaatggcgagccccacatgatcgtgtcccggcaggagaagggcaagtctctgctgtttaagacagaggacggcgtgaacatgtgcaccctgatggctatggacctgggcgagctgtgcgaggataccatcacatacaagtgtcctctgctgagacagaatgagccagaggacatcgattgctggtgtaacagcacctccacatgggtgacctacggcacctgtaccacaatgggcgagcaccggagagagaagcggagcgtggccctggtgccccacgtgggaatgggcctggagaccagaacagagacctggatgagctccgagggagcatggaagcacgtgcagcgcatcgagacatggattctgaggcaccccggcttcaccatgatggcagccatcctggcctacacaatcggcaccacacacttccagcgggccctgatctttatcctgctgacagccgtgacccctagcatgaccatgagatgcatcggcatgtccaatagggacttcgtggagggcgtgtctggaggcagctgggtggacatcgtgctggagcacggctcctgcgtgaccacaatggccaagaacaagcctaccctggactttgagctgatcaagacagaggccaagcagccagccaccctgcggaagtattgcatcgaggccaagctgaccaataccacaaccgagagccggtgtccaacacagggagagcctagcctgaacgaggagcaggacaagcggttcgtgtgcaagcacagcatggtggataggggctggggcaatggctgtggcctgttcggcaagggcggcatcgtgacctgcgccatgtttaggtgtaagaagaatatggagggcaaggtggtgcagcctgagaacctggagtacaccatcgtgatcacaccacactccggagaggagcacgcagtgggaaacgataccggcaagcacggcaaggagatcaagatcacaccacagtctagcatcaccgaggccgagctgacaggctatggcacagtgacaatggagtgcagccccaggaccggcctggacttcaatgaggtggtgctgctgcagatggagaacaaggcctggctggtgcaccgccagtggtttctggacctgcctctgccctggctgcctggcgcagatacccagggcagcaattggattcagaaggagacactggtgaccttcaagaacccacacgccaagaagcaggatgtggtggtgctgggctcccaggagggagcaatgcacacagccctgaccggagccacagagatccagatgtcctctggcaacctgctgttcaccggacacctgaagtgccgcctgaggatggacaagctgcagctgaagggcatgtcttacagcatgtgcaccggcaagtttaaggtggtgaaggagatcgccgagacccagcacggcacaatcgtgatcagggtgcagtatgagggcgacggcagcccttgtaagatccccttcgagatcatggatctggagaagaggcacgtgctgggccggctgatcacagtgaatccaatcgtgaccgagaaggactctcccgtgaacatcgaggccgagccaccctttggcgatagctacatcatcatcggcgtggagcctggccagctgaagctgaattggttcaagaagggcagctccatcggccagatgtttgagacaaccatgagaggcgccaagaggatggcaatcctgggcgacaccgcatgggatttcggcagcctgggaggcgtgtttacatccatcggcaaggccctgcaccaggtgttcggagccatctatggcgccgccttttccggcgtgtcttggaccatgaagatcctgatcggcgtgatcatcacatggatcggcatgaactcccgcagcacctcactgtctgtgacactagtattggtgggaattgtgacactgtatttgggagtcatggtgcaggccgatagtggttgcgttgtgagctggaaaaacaaagaacttaagtgtggcagtgggattttcatcacagacaacgtgcacacatggacagaacaatacaagttccaaccagaatccccttcaaaactagcttcagctatccagaaagcccatgaagagggcatttgtggaatccgctcagtaacaagactggagaatctgatgtggaaacaaataacaccagaattgaatcacattctatcagaaaatgaggtgaagttaactattatgacaggagacatcaaaggaatcatgcaggcaggaaaacgatctctgcggcctcagcccactgagctgaagtattcatggaaaacatggggcaaagcaaaaatgctctctacagagtctcataaccagacctttctcattgatggccccgaaacagcagaatgccccaacacaaatagagcttggaattcgttggaagttgaagactatggctttggagtattcaccaccaatatatggctaaaattgaaagaaaaacaggatgtattctgcgactcaaaactcatgtcagcggccataaaagacaacagagccgtccatgccgatatgggttattggatagaaagtgcactcaatgacacatggaagatagagaaagcctctttcattgaagttaaaaactgccactggccaaaatcacacaccctctggagcaatggagtgctagaaagtgagatgataattccaaagaatctcgctggaccagtgtctcaacacaactatagaccaggctaccatacacaaataacaggaccatggcatctaggtaagcttgagatggactttgatttctgtgatggaacaacagtggtagtgactgaggactgcggaaatagaggaccctctttgagaacaaccactgcctctggaaaactcataacagaatggtgctgccgatcttgcacattaccaccgctaagatacagaggtgaggatgggtgctggtacgggatggaaatcagaccattgaaggagaaagaagagaatttggtcaactccttggtcacagctggacatgggcaggtcgacaacttttcactaggagtcttgggaatggcattgttcctggaggaaatgcttaggacccgagtaggaacgaaacatgcaatactactagttgcagtttcttttgtgacattgatcacagggaacatgtcctttagagacctgggaagagtgatggttatggtaggcgccactatgacggatgacataggtatgggcgtgacttatcttgccctactagcagccttcaaagtcagaccaacttttgcagctggactactcttgagaaagctgacctccaaggaattgatgatgactactataggaattgtactcctctcccagagcaccataccagagaccattcttgagttgactgatgcgttagccttaggcatgatggtcctcaaaatggtgagaaatatggaaaagtatcaattggcagtgactatcatggctatcttgtgcgtcccaaacgcagtgatattacaaaacgcatggaaagtgagttgcacaatattggcagtggtgtccgtttccccactgctcttaacatcctcacaacagaaaacggattggataccattagcattgacgatcaaaggtctcaatccaacagctatttttctaacaaccctctcaagaaccagcaagaaaaggagctggccattaaatgaggctatcatggcagtcgggatggtgagcattttagccagttctctcctaaaaaatgatattcccatgacaggaccattagtggctggagggctcctcactgtgtgctacgtgctcactggacgatcggccgatttggaactggagagagcagccgatgtcaaatgggaagaccaggcagagatatcaggaagcagtccaatcctgtcaataacaatatcagaagatggtagcatgtcgataaaaaatgaagaggaagaacaaacactgaccatactcattagaacaggattgctggtgatctcaggactttttcctgtatcaataccaatcacggcagcagcatggtacctgtgggaagtgaagaaacaacgggccggagtattgtgggatgttccttcacccccacccatgggaaaggctgaactggaagatggagcctatagaattaagcaaaaagggattcttggatattcccagatcggagccggagtttacaaagaaggaacattccatacaatgtggcatgtcacacgtggcgctgttctaatgcataaaggaaagaggattgaaccatcatgggcggacgtcaagaaagacctaatatcatatggaggaggctggaagttagaaggagaatggaaggaaggagaagaagtccaggtattggcactggagcctggaaaaaatccaagagccgtccaaacgaaacctggtcttttcaaaaccaacgccggaacaataggtgctgtatctctggacttttctcctggaacgtcaggatctccaattatcgacaaaaaaggaaaagttgtgggtctttatggtaatggtgttgttacaaggagtggagcatatgtgagtgctatagcccagactgaaaaaagcattgaagacaacccagagatcgaagatgacattttccgaaagagaagactgaccatcatggacctccacccaggagcgggaaagacgaagagataccttccggccatagtcagagaagctataaaacggggtttgagaacattaatcttggcccccactagagttgtggcagctgaaatggaggaagcccttagaggacttccaataagataccagaccccagccatcagagctgagcacaccgggcgggagattgtggacctaatgtgtcatgccacatttaccatgaggctgctatcaccagttagagtgccaaactacaacctgattatcatggacgaagcccatttcacagacccagcaagtatagcagctagaggatacatctcaactcgagtggagatgggtgaggcagctgggatttttatgacagccactcccccgggaagcagagacccatttcctcagagcaatgcaccaatcatagatgaagaaagagaaatccctgaacgttcgtggaattccggacatgaatgggtcacggattttaaagggaagactgtttggttcgttccaagtataaaagcaggaaatgatatagcagcttgcctgaggaaaaatggaaagaaagtgatacaactcagtaggaagacctttgattctgagtatgtcaagactagaaccaatgattgggacttcgtggttacaactgacatttcagaaatgggtgccaatttcaaggctgagagggttatagaccccagacgctgcatgaaaccagtcatactaacagatggtgaagagcgggtgattctggcaggacctatgccagtgacccactctagtgcagcacaaagaagagggagaataggaagaaatccaaaaaatgagaatgaccagtacatatacatgggggaacctctggaaaatgatgaagactgtgcacactggaaagaagctaaaatgctcctagataacatcaacacgccagaaggaatcattcctagcatgttcgaaccagagcgtgaaaaggtggatgccattgatggcgaataccgcttgagaggagaagcaaggaaaacctttgtagacttaatgagaagaggagacctaccagtctggttggcctacagagtggcagctgaaggcatcaactacgcagacagaaggtggtgttttgatggagtcaagaacaaccaaatcctagaagaaaacgtggaagttgaaatctggacaaaagaaggggaaaggaagaaattgaaacccagatggttggatgctaggatctattctgacccactggcgctaaaagaatttaaggaatttgcagccggaagaaagtctctgaccctgaacctaatcacagaaatgggtaggctcccaaccttcatgactcagaaggcaagagacgcactggacaacttagcagtgctgcacacggctgaggcaggtggaagggcgtacaaccatgctctcagtgaactgccggagaccctggagacattgcttttactgacacttctggctacagtcacgggagggatctttttattcttgatgagcggaaggggcatagggaagatgaccctgggaatgtgctgcataatcacggctagcatcctcctatggtacgcacaaatacagccacactggatagcagcttcaataatactggagttttttctcatagttttgcttattccagaacctgaaaaacagagaacaccccaagacaaccaactgacctacgttgtcatagccatcctcacagtggtggccgcaaccatggcaaacgagatgggtttcctagaaaaaacgaagaaagatctcggattgggaagcattgcaacccagcaacccgagagcaacatcctggacatagatctacgtcctgcatcagcatggacgctgtatgccgtggccacaacatttgttacaccaatgttgagacatagcattgaaaattcctcagtgaatgtgtccctaacagctatagccaaccaagccacagtgttaatgggtctcgggaaaggatggccattgtcaaagatggacatcggagttccccttctcgccattggatgctactcacaagtcaaccccataactctcacagcagctcttttcttattggtagcacattatgccatcatagggccaggactccaagcaaaagcaaccagagaagctcagaaaagagcagcggcgggcatcatgaaaaacccaactgtcgatggaataacagtgattgacctagatccaataccttatgatccaaagtttgaaaagcagttgggacaagtaatgctcctagtcctctgcgtgactcaagtattgatgatgaggactacatgggctctgtgtgaggctttaaccttagctaccgggcccatctccacattgtgggaaggaaatccagggaggttttggaacaccaccattgcggtgtcaatggctaacatttttagagggagttacttggccggagctggacttctcttttctattatgaagaacacaaccaacacaagaaggggaactggcaacataggagagacgcttggagagaaatggaaaagccgattgaacgcattgggaaaaagtgaattccagatctacaagaaaagtggaatccaggaagtggatagaaccttagcaaaagaaggcattaaaagaggagaaacggaccatcacgctgtgtcgcgaggctcagcaaaactgagatggttcgttgagagaaacatggtcacaccagaagggaaagtagtggacctcggttgtggcagaggaggctggtcatactattgtggaggactaaagaatgtaagagaagtcaaaggcctaacaaaaggaggaccaggacacgaagaacccatccccatgtcaacatatgggtggaatctagtgcgtcttcaaagtggagttgacgttttcttcatcccgccagaaaagtgtgacacattattgtgtgacataggggagtcatcaccaaatcccacagtggaagcaggacgaacactcagagtccttaacttagtagaaaattggttgaacaacaacactcaattttgcataaaggttctcaacccatatatgccctcagttatagaaaaaatggaagcactacaaaggaaatatggaggagccttagtgaggaatccactctcacgaaactccacacatgagatgtactgggtatccaatgcttccgggaacatagtgtcatcagtgaacatgatttcaaggatgttgatcaacagatttacaatgagatacaagaaagccacttacgagccggatgttgacctcggaagcggaacccgtaacatcgggattgaaagtgagataccaaacctagatataattgggaaaagaatagaaaaaataaagcaagagcatgaaacatcatggcactatgaccaagaccacccatacaaaacgtgggcataccatggtagctatgaaacaaaacagactggatcagcatcatccatggtcaacggagtggtcaggctgctgacaaaaccttgggacgtcgtccccatggtgacacagatggcaatgacagacacgactccatttggacaacagcgcgtttttaaagagaaagtggacacgagaacccaagaaccgaaagaaggcacgaagaaactaatgaaaataacagcagagtggctttggaaagaattagggaagaaaaagacacccaggatgtgcaccagagaagaattcacaagaaaggtgagaagcaatgcagccttgggggccatattcactgatgagaacaagtggaagtcggcacgtgaggctgttgaagatagtaggttttgggagctggttgacaaggaaaggaatctccatcttgaaggaaagtgtgaaacatgtgtgtacaacatgatgggaaaaagagagaagaagctaggggaattcggcaaggcaaaaggcagcagagccatatggtacatgtggcttggagcacgcttcttagagtttgaagccctaggattcttaaatgaagatcactggttctccagagagaactccctgagtggagtggaaggagaagggctgcacaagctaggttacattctaagagacgtgagcaagaaagagggaggagcaatgtatgccgatgacaccgcaggatgggatacaagaatcacactagaagacctaaaaaatgaagaaatggtaacaaaccacatggaaggagaacacaagaaactagccgaggccattttcaaactaacgtaccaaaacaaggtggtgcgtgtgcaaagaccaacaccaagaggcacagtaatggacatcatatcgagaagagaccaaagaggtagtggacaagttggcacctatggactcaatactttcaccaatatggaagcccaactaatcagacagatggagggagaaggagtctttaaaagcattcagcacctaacaatcacagaagaaatcgctgtgcaaaactggttagcaagagtggggcgcgaaaggttatcaagaatggccatcagtggagatgattgtgttgtgaaacctttagatgacaggttcgcaagcgctttaacagctctaaatgacatgggaaagattaggaaagacatacaacaatgggaaccttcaagaggatggaatgattggacacaagtgcccttctgttcacaccatttccatgagttaatcatgaaagacggtcgcgtactcgttgttccatgtagaaaccaagatgaactgattggcagagcccgaatctcccaaggagcagggtggtctttgcgggagacggcctgtttggggaagtcttacgcccaaatgtggagcttgatgtacttccacagacgcgacctcaggctggcggcaaatgctatttgctcggcagtaccatcacattgggttccaacaagtcgaacaacctggtccatacatgctaaacatgaatggatgacaacggaagacatgctgacagtctggaacagggtgtggattcaagaaaacccatggatggaagacaaaactccagtggaatcatgggaggaaatcccatacttggggaaaagagaagaccaatggtgcggctcattgattgggttaacaagcagggccacctgggcaaagaacatccaagcagcaataaatcaagttagatcccttataggcaatgaagaatacacagattacatgccatccatgaaaagattcagaagagaagaggaagaagcaggagttctgtggtag

SEQ ID NO: 9 - DNA, 10806 bp, synthetic construct
  source 1..10806: mol_type = other DNA
agttgttgatctgtgtgaatcagactgcgacagttcgagtttgaagcgaaagctagcaacagtatcaacaggttttattttggatttggaaacgagagtttctggtcatgaaaaacccaaaaaagaaatccggaggattccggattgtcaatatgctaaaacgcggagtagcccgtgtgagcccctttgggggcttgaagaggctgccagccggacttctgctgggtcatgggcccatcaggatggtcttggcgattctagcctttttgagattcacggcaatcaagccatcactgggtctcatcaatagatggggttcagtggggaaaaaagaggctatggaaacaataaagaagttcaagaaagatctggctgccatgctgagaataatcaatgctaggaaggagaagaagagacgaggcgcagatactagtgtcggaattgttggcctcctgctgaccacagctatggcagcggaggtcactagacgtgggagtgcatactatatgtacttggacagaaacgatgctgggaaggccatatcttttccaaccacattggggatgaataagtgttatatacagatcatggatcttggacacatgtgtgatgccaccatgagctatgaatgccctatgctggatgagggggtggaaccagatgacgtcgattgttggtgcaacacgacgtcaacttgggttgtgtacggaacctgccatcacaaaaaaggtgaagcacggagatctagaagagctgtgacgctcccctcccattccaccaggaagctgcaaacgcggtcgcaaacctggttggaatcaagagaatacacaaagcacttgattagagtcgaaaattggatattcaggaaccctggcttcgcgttagcagcagctgccatcgcttggcttttgggaagctcaacgagccaaaaagtcatatacttggtcatgatactgctgattgccccggcatacagcatcaggtgcataggagtcagcaatagggactttgtggaaggtatgtcaggtgggacttgggttgatgttgtcttggaacatggaggttgtgtcaccgtaatggcacaggacaaaccgactgtcgacatagagctggttacaacaacagtcagcaacatggcggaggtaagatcctactgctatgaggcatcaatatcagacatggcttctgacagccgctgcccaacacaaggtgaagcctaccttgacaagcaatcagacactcaatatgtctgcaaaagaacgttagtggacagaggctggggaaatggatgtggactttttggcaaagggagcctggtgacatgcgctaagtttgcatgctccaagaaaatgaccgggaagagcatccagccagagaatctggagtaccggataatgctgtcagttcatggctcccagcacagtgggatgatcgttaatgacacaggacatgaaactgatgagaatagagcgaaagttgagataacgcccaattcaccgagagccgaagccaccctggggggttttggaagcctaggacttgattgtgaaccgaggacaggccttgacttttcagatttgtattacttgactatgaataacaagcactggttggttcacaaggagtggttccacgacattccattaccttggcacgctggggcagacaccggaactccacactggaacaacaaagaagcactggtagagttcaaggacgcacatgccaaaaggcaaactgtcgtggttctagggagtcaagaaggagcagttcacacggcccttgctggagctctggaggctgagatggatggtgcaaagggaaggctgtcctctggccacttgaaatgtcgcctgaaaatggataaacttagattgaagggcgtgtcatactccttgtgtactgcagcgttcacattcaccaagatcccggctgaaacactgcacgggacagtcacagtggagttacagtacgcagggacagatggaccttgcaaggttccagctcagatggcggtggacatgcaaactctgaccccagttgggaggttgataaccgctaaccccgtaatcactgaaagcactgagaactctaagatgatgctggaacttgatccaccatttggggactcttacattgtcataggagtcggggagaagaagatcacccaccactggcacaggagtggcagcaccattggaaaagcatttgaagccactgtgagaggtgccaagagaatggcagtcttgggagacacagcctgggactttggatcagttggaggcgctctcaactcattgggcaagggcatccatcaaatttttggagcagctttcaaatcattgtttggaggaatgtcctggttctcacaaattctcattggaacgttgctgatgtggttgggtctgaacacaaagaatggatctatttcccttatgtgcttggccttagggggagtgttgatcttcttatccacagccgtctctgctgatgtggggtgctcggtggacttctcaaagaaggagacgagatgcggtacaggggtgttcgtctataacgacgttgaagcctggagggacaggtacaagtaccatcctgactccccccgtagattggcagcagcagtcaagcaagcctgggaagatggtatctgcgggatctcctctgtttcaagaatggaaaacatcatgtggagatcagtagaaggggagctcaacgcaatcctggaagagaatggagttcaactgacggtcgttgtgggatctgtaaaaaaccccatgtggagaggtccacagagattgcccgtgcctgtgaacgagctgccccacggctggaaggcttgggggaaatcgtatttcgtcagagcagcaaagacaaataacagctttgtcgtggatggtgacacactgaaggaatgcccactcaaacatagagcatggaacagctttcttgtggaggatcatgggttcggggtatttcacactagtgtctggctcaaggttagagaagattattcattagagtgtgatccagccgttattggaacagctgttaagggaaaggaggctgtacacagtgatctaggctactggattgagagtgagaagaatgacacatggaggctgaagagggcccatctgatcgagatgaaaacatgtgaatggccaaagtcccacacattgtggacagatggaatagaagagagtgatctgatcatacccaagtctttagctgggccactcagccatcacaataccagagagggctacaggacccaaatgaaagggccatggcacagtgaagagcttgaaattcggtttgaggaatgcccaggtaccaaggtccacgtggaggaaacatgtggaacaagaggaccatctctgagatcaaccactgcaagcggaagggtgatcgaggaatggtgctgcagggagtgcacaatgcccccactgtcgttccgggctaaagatggctgttggtatggaatggagataaggcccaggaaagaaccagaaagcaacttagtaaggtcaatggtgactgcaggatcaactgatcacatggaccacttctcccttggagtgcttgtgatcctgctcatggtgcaggaagggctgaagaagagaatgaccacaaagatcatcataagcacatcaatggcagtgctggtagctatgatcctgggaggattttcaatgagtgacctggctaagcttgcaattttgatgggtgccaccttcgcggaaatgaacactggaggagatgtagctcatctggcgctgatagcggcattcaaagtcagaccagcgttgctggtatctttcatcttcagagctaattggacaccccgtgaaagcatgctgctggccttggcctcgtgtcttttgcaaactgcgatctccgccttggaaggcgacctgatggttctcatcaatggttttgctttggcctggttggcaatacgagcgatggttgttccacgcactgataacatcaccttggcaatcctggctgctctgacaccactggcccggggcacactgcttgtggcgtggagagcaggccttgctacttgcggggggtttatgctcctctctctgaagggaaaaggcagtgtgaagaagaacttaccatttgtcatggccctgggactaaccgctgtgaggctggtcgaccccatcaacgtggtgggactgctgttgctcacaaggagtgggaagcggagctggccccctagcgaagtactcacagctgttggcctgatatgcgcattggctggagggttcgccaaggcagatatagagatggctgggcccatggccgcggtcggtctgctaattgtcagttacgtggtctcaggaaagagtgtggacatgtacattgaaagagcaggtgacatcacatgggaaaaagatgcggaagtcactggaaacagtccccggctcgatgtggcgctagatgagagtggtgatttctccctggtggaggatgacggtccccccatgagagagatcatactcaaggtggtcctgatgaccatctgtggcatgaacccaatagccataccctttgcagctggagcgtggtacgtatacgtgaagactggaaaaaggagtggtgctctatgggatgtgcctgctcccaaggaagtaaaaaagggggagaccacagatggagtgtacagagtaatgactcgtagactgctaggttcaacacaagttggagtgggagttatgcaagagggggtctttcacactatgtggcacgtcacaaaaggatccgcgctgagaagcggtgaagggagacttgatccatactggggagatgtcaagcaggatctggtgtcatactgtggtccatggaagctagatgccgcctgggatgggcacagcgaggtgcagctcttggccgtgccccccggagagagagcgaggaacatccagactctgcccggaatatttaagacaaaggatggggacattggagcggttgcgctggattacccagcaggaacttcaggatctccaatcctagacaagtgtgggagagtgataggactttatggcaatggggtcgtgatcaaaaacgggagttatgttagtgccatcacccaagggaggagggaggaagagactcctgttgagtgcttcgagccctcgatgctgaagaagaagcagctaactgtcttagacttgcatcctggagctgggaaaaccaggagagttcttcctgaaatagtccgtgaagccataaaaacaagactccgtacggtgatcttagctccaaccagggttgtcgctgctgaaatggaggaggcccttagagggcttccagtgcgttatatgacaacagcagtcaatgtcacccactctggaacagaaatcgtcgacttaatgtgccatgccaccttcacttcacgtctactacagccaatcagagtccccaactataatctgtatattatggatgaggcccacttcacagatccctcaagtatagcagcaagaggatacatttcaacaagggttgagatgggcgaggcggctgccatcttcatgaccgccacgccaccaggaacccgtgacgcatttccggactccaactcaccaattatggacaccgaagtggaagtcccagagagagcctggagctcaggctttgattgggtgacggatcattttggaaaaacagtttggtttgttccaagcgtgaggaacggcaatgagatcgcagcttgtctgacaaaggctggaaaacgggtcatacagctcagcagaaagacttttgagacagagttccagaaaacaaaacatcaagagtgggactttgtcgtgacaactgacatttcagagatgggcgccaactttaaagctgaccgtgtcatagattccaggagatgcctaaagccggtcatacttgatggcgagagagtcattctggctggacccatgcctgtcacacatgccagcgctgcccagaggagggggcgcataggcaggaatcccaacaaacctggagatgagtatctgtatggaggtgggtgcgcagagactgacgaagaccatgcacactggcttgaagcaagaatgctccttgacaatatttacctccaagatggcctcatagcctcgctctatcgacctgaggccgacaaagtagcagccattgagggagagttcaagcttaggacggagcaaaggaagacctttgtggaactcatgaaaagaggagatcttcctgtttggctggcctatcaggttgcatctgccggaataacctacacagatagaagatggtgctttgatggcacgaccaacaacaccataatggaagacagtgtgccggcagaggtgtggaccagacacggagagaaaagagtgctcaaaccgaggtggatggacgccagagtttgttcagatcatgcggccctgaagtcattcaaggagtttgccgctgggaaaagaggagcggcttttggagtgatggaagccctgggaacactgccaggacacatgacagagagattccaggaagccattgacaacctcgctgtgctcatgcgggcagagactggaagcaggccttacaaagccgcggcggcccaattgccggagaccctagagaccataatgcttttggggttgctgggaacagtctcgctgggaatcttcttcgtcttgatgaggaacaagggcatagggaagatgggctttggaatggtgactcttggggccagcgcatggctcatgtggctctcggaaattgagccagccagaattgcatgtgtcctcattgttgtgttcctattgctggtggtgctcatacctgagccagaaaagcaaagatctccccaggacaaccaaatggcaatcatcatcatggtagcagtaggtcttctgggcttgattaccgccaatgaactcggatggttggagagaacaaagagtgacctaagccatctaatgggaaggagagaggagggggcaaccataggattctcaatggacattgacctgcggccagcctcagcttgggccatctatgctgccttgacaactttcattaccccagccgtccaacatgcagtgaccacctcatacaacaactactccttaatggcgatggccacgcaagctggagtgttgtttggcatgggcaaagggatgccattctacgcatgggactttggagtcccgctgctaatgataggttgctactcacaattaacacccctgaccctaatagtggccatcattttgctcgtggcgcactacatgtacttgatcccagggctgcaggcagcagctgcgcgtgctgcccagaagagaacggcagctggcatcatgaagaaccctgttgtggatggaatagtggtgactgacattgacacaatgacaattgacccccaagtggagaaaaagatgggacaggtgctactcatagcagtagccgtctccagcgccatactgtcgcggaccgcctgggggtggggggaggctggggctctgatcacagccgcaacttccactttgtgggaaggctctccgaacaagtactggaactcctctacagccacttcactgtgtaacatttttaggggaagttacttggctggagcttctctaatctacacagtaacaagaaacgctggcttggtcaagagacgtgggggtggaacaggagagaccctgggagagaaatggaaggcccgcttgaaccagatgtcggccctggagttctactcctacaaaaagtcaggcatcaccgaggtgtgcagagaagaggcccgccgcgccctcaaggacggtgtggcaacgggaggccatgctgtgtcccgaggaagtgcaaagctgagatggttggtggagcggggatacctgcagccctatggaaaggtcattgatcttggatgtggcagagggggctggagttactacgtcgccaccatccgcaaagttcaagaagtgaaaggatacacaaaaggaggccctggtcatgaagaacccgtgttggtgcaaagctatgggtggaacatagtccgtcttaagagtggggtggacgtctttcatatggcggctgagccgtgtgacacgttgctgtgtgacataggtgagtcatcatctagtcctgaagtggaagaagcacggacgctcagagtcctctccatggtgggggattggcttgaaaaaagaccaggagccttttgtataaaagtgttgtgcccatacaccagcactatgatggaaaccctggagcgactgcagcgtaggtatgggggaggactggtcagagtgccactctcccgcaactctacacatgagatgtactgggtctctggagcgaaaagcaacaccataaaaagtgtgtccaccacgagccagctcctcttggggcgcatggacgggcctaggaggccagtgaaatatgaggaggatgtgaatctcggctctggcacgcgggctgtggtaagctgcgctgaagctcccaacatgaagatcattggtaaccgcattgaaaggatccgcagtgagcacgcggaaacgtggttctttgacgagaaccacccatataggacatgggcttaccatggaagctatgaggcccccacacaagggtcagcgtcctctctaataaacggggttgtcaggctcctgtcaaaaccctgggatgtggtgactggagtcacaggaatagccatgaccgacaccacaccgtatggtcagcaaagagttttcaaggaaaaagtggacactagggtgccagacccccaagaaggcactcgtcaggttatgagcatggtctcttcctggttgtggaaagagctaggcaaacacaaacggccacgagtctgcaccaaagaagagttcatcaacaaggttcgtagcaatgcagcattaggggcaatatttgaagaggaaaaagagtggaagactgcagtggaagctgtgaacgatccaaggttctgggctctagtggacaaggaaagagagcaccacctgagaggagagtgccagagctgtgtgtacaacatgatgggaaaaagagaaaagaaacaaggggaatttggaaaggccaagggcagccgcgccatctggtatatgtggctaggggctagatttctagagttcgaagcccttggattcttgaacgaggatcactggatggggagagagaactcaggaggtggtgttgaagggctgggattacaaagactcggatatgtcctagaagagatgagtcgtataccaggaggaaggatgtatgcagatgacactgctggctgggacacccgcattagcaggtttgatctggagaatgaagctctaatcaccaaccaaatggagaaagggcacagggccttggcattggccataatcaagtacacataccaaaacaaagtggtaaaggtccttagaccagctgaaaaagggaaaacagttatggacattatttcgagacaagaccaaagggggagcggacaagttgtcacttacgctcttaacacattcaccaacctagtggtgcaactcattcggaatatggaggctgaggaagttctagagatgcaagacttgtggctgctgcggaggtcagagaaagtgaccaactggttgcagagcaacggatgggataggctcaaacgaatggcagtcagtggagatgattgcgttgtgaagccaattgatgataggtttgcacatgccctcaggttcttgaatgatatgggaaaagttaggaaggacacacaagagtggaaaccctcaactggatgggacaactgggaagaagttccgttttgctcccaccacttcaacaagctccatctcaaggacgggaggtccattgtggttccctgccgccaccaagatgaactgattggccgggcccgcgtctctccaggggcgggatggagcatccgggagactgcttgcctagcaaaatcatatgcgcaaatgtggcagctcctttatttccacagaagggacctccgactgatggccaatgccatttgttcatctgtgccagttgactgggttccaactgggagaactacctggtcaatccatggaaagggagaatggatgaccactgaagacatgcttgtggtgtggaacagagtgtggattgaggagaacgaccacatggaagacaagaccccagttacgaaatggacagacattccctatttgggaaaaagggaagacttgtggtgtggatctctcatagggcacagaccgcgcaccacctgggctgagaacattaaaaacacagtcaacatggtgcgcaggatcataggtgatgaagaaaagtacatggactacctatccacccaagttcgctacttgggtgaagaagggtctacacctggagtgctgtaagcaccaatcttaatgttgtcaggcctgctagtcagccacagcttggggaaagctgtgcagcctgtgacccccccaggagaagctgggaaaccaagcctatagtcaggccgagaacgccatggcacggaagaagccatgctgcctgtgagcccctcagaggacactgagtcaaaaaaccccacgcgcttggaggcgcaggatgggaaaagaaggtggcgaccttccccacccttcaatctggggcctgaactggagatcagctgtggatctccagaagagggactagtggttagaggagaccccccggaaaacgcaaaacagcatattgacgctgggaaagaccagagactccatgagtttccaccacgctggccgccaggcacagatcgccgaatagcggcggccggtgtggggaaatccatgggtc

SEQ ID NO: 10 - DNA, 10272 bp, synthetic construct
  source 1..10272: mol_type = other DNA
atgaaaaacccaaaaaagaaatccggaggattccggattgtcaatatgctaaaacgcggagtagcccgtgtgagcccctttgggggcttgaagaggctgccagccggacttctgctgggtcatgggcccatcaggatggtcttggcgattctagcctttttgagattcacggcaatcaagccatcactgggtctcatcaatagatggggttcagtggggaaaaaagaggctatggaaacaataaagaagttcaagaaagatctggctgccatgctgagaataatcaatgctaggaaggagaagaagagacgaggcgcagatactagtgtcggaattgttggcctcctgctgaccacagctatggcagcggaggtcactagacgtgggagtgcatactatatgtacttggacagaaacgatgctgggaaggccatatcttttccaaccacattggggatgaataagtgttatatacagatcatggatcttggacacatgtgtgatgccaccatgagctatgaatgccctatgctggatgagggggtggaaccagatgacgtcgattgttggtgcaacacgacgtcaacttgggttgtgtacggaacctgccatcacaaaaaaggtgaagcacggagatctagaagagctgtgacgctcccctcccattccaccaggaagctgcaaacgcggtcgcaaacctggttggaatcaagagaatacacaaagcacttgattagagtcgaaaattggatattcaggaaccctggcttcgcgttagcagcagctgccatcgcttggcttttgggaagctcaacgagccaaaaagtcatatacttggtcatgatactgctgattgccccggcatacagcatcaggtgcataggagtcagcaatagggactttgtggaaggtatgtcaggtgggacttgggttgatgttgtcttggaacatggaggttgtgtcaccgtaatggcacaggacaaaccgactgtcgacatagagctggttacaacaacagtcagcaacatggcggaggtaagatcctactgctatgaggcatcaatatcagacatggcttctgacagccgctgcccaacacaaggtgaagcctaccttgacaagcaatcagacactcaatatgtctgcaaaagaacgttagtggacagaggctggggaaatggatgtggactttttggcaaagggagcctggtgacatgcgctaagtttgcatgctccaagaaaatgaccgggaagagcatccagccagagaatctggagtaccggataatgctgtcagttcatggctcccagcacagtgggatgatcgttaatgacacaggacatgaaactgatgagaatagagcgaaagttgagataacgcccaattcaccgagagccgaagccaccctggggggttttggaagcctaggacttgattgtgaaccgaggacaggccttgacttttcagatttgtattacttgactatgaataacaagcactggttggttcacaaggagtggttccacgacattccattaccttggcacgctggggcagacaccggaactccacactggaacaacaaagaagcactggtagagttcaaggacgcacatgccaaaaggcaaactgtcgtggttctagggagtcaagaaggagcagttcacacggcccttgctggagctctggaggctgagatggatggtgcaaagggaaggctgtcctctggccacttgaaatgtcgcctgaaaatggataaacttagattgaagggcgtgtcatactccttgtgtactgcagcgttcacattcaccaagatcccggctgaaacactgcacgggacagtcacagtggagttacagtacgcagggacagatggaccttgcaaggttccagctcagatggcggtggacatgcaaactctgaccccagttgggaggttgataaccgctaaccccgtaatcactgaaagcactgagaactctaagatgatgctggaacttgatccaccatttggggactcttacattgtcataggagtcggggagaagaagatcacccaccactggcacaggagtggcagcaccattggaaaagcatttgaagccactgtgagaggtgccaagagaatggcagtcttgggagacacagcctgggactttggatcagttggaggcgctctcaactcattgggcaagggcatccatcaaatttttggagcagctttcaaatcattgtttggaggaatgtcctggttctcacaaattctcattggaacgttgctgatgtggttgggtctgaacacaaagaatggatctatttcccttatgtgcttggccttagggggagtgttgatcttcttatccacagccgtctctgctgatgtggggtgctcggtggacttctcaaagaaggagacgagatgcggtacaggggtgttcgtctataacgacgttgaagcctggagggacaggtacaagtaccatcctgactccccccgtagattggcagcagcagtcaagcaagcctgggaagatggtatctgcgggatctcctctgtttcaagaatggaaaacatcatgtggagatcagtagaaggggagctcaacgcaatcctggaagagaatggagttcaactgacggtcgttgtgggatctgtaaaaaaccccatgtggagaggtccacagagattgcccgtgcctgtgaacgagctgccccacggctggaaggcttgggggaaatcgtatttcgtcagagcagcaaagacaaataacagctttgtcgtggatggtgacacactgaaggaatgcccactcaaacatagagcatggaacagctttcttgtggaggatcatgggttcggggtatttcacactagtgtctggctcaaggttagagaagattattcattagagtgtgatccagccgttattggaacagctgttaagggaaaggaggctgtacacagtgatctaggctactggattgagagtgagaagaatgacacatggaggctgaagagggcccatctgatcgagatgaaaacatgtgaatggccaaagtcccacacattgtggacagatggaatagaagagagtgatctgatcatacccaagtctttagctgggccactcagccatcacaataccagagagggctacaggacccaaatgaaagggccatggcacagtgaagagcttgaaattcggtttgaggaatgcccaggtaccaaggtccacgtggaggaaacatgtggaacaagaggaccatctctgagatcaaccactgcaagcggaagggtgatcgaggaatggtgctgcagggagtgcacaatgcccccactgtcgttccgggctaaagatggctgttggtatggaatggagataaggcccaggaaagaaccagaaagcaacttagtaaggtcaatggtgactgcaggatcaactgatcacatggaccacttctcccttggagtgcttgtgatcctgctcatggtgcaggaagggctgaagaagagaatgaccacaaagatcatcataagcacatcaatggcagtgctggtagctatgatcctgggaggattttcaatgagtgacctggctaagcttgcaattttgatgggtgccaccttcgcggaaatgaacactggaggagatgtagctcatctggcgctgatagcggcattcaaagtcagaccagcgttgctggtatctttcatcttcagagctaattggacaccccgtgaaagcatgctgctggccttggcctcgtgtcttttgcaaactgcgatctccgccttggaaggcgacctgatggttctcatcaatggttttgctttggcctggttggcaatacgagcgatggttgttccacgcactgataacatcaccttggcaatcctggctgctctgacaccactggcccggggcacactgcttgtggcgtggagagcaggccttgctacttgcggggggtttatgctcctctctctgaagggaaaaggcagtgtgaagaagaacttaccatttgtcatggccctgggactaaccgctgtgaggctggtcgaccccatcaacgtggtgggactgctgttgctcacaaggagtgggaagcggagctggccccctagcgaagtactcacagctgttggcctgatatgcgcattggctggagggttcgccaaggcagatatagagatggctgggcccatggccgcggtcggtctgctaattgtcagttacgtggtctcaggaaagagtgtggacatgtacattgaaagagcaggtgacatcacatgggaaaaagatgcggaagtcactggaaacagtccccggctcgatgtggcgctagatgagagtggtgatttctccctggtggaggatgacggtccccccatgagagagatcatactcaaggtggtcctgatgaccatctgtggcatgaacccaatagccataccctttgcagctggagcgtggtacgtatacgtgaagactggaaaaaggagtggtgctctatgggatgtgcctgctcccaaggaagtaaaaaagggggagaccacagatggagtgtacagagtaatgactcgtagactgctaggttcaacacaagttggagtgggagttatgcaagagggggtctttcacactatgtggcacgtcacaaaaggatccgcgctgagaagcggtgaagggagacttgatccatactggggagatgtcaagcaggatctggtgtcatactgtggtccatggaagctagatgccgcctgggatgggcacagcgaggtgcagctcttggccgtgccccccggagagagagcgaggaacatccagactctgcccggaatatttaagacaaaggatggggacattggagcggttgcgctggattacccagcaggaacttcaggatctccaatcctagacaagtgtgggagagtgataggactttatggcaatggggtcgtgatcaaaaacgggagttatgttagtgccatcacccaagggaggagggaggaagagactcctgttgagtgcttcgagccctcgatgctgaagaagaagcagctaactgtcttagacttgcatcctggagctgggaaaaccaggagagttcttcctgaaatagtccgtgaagccataaaaacaagactccgtacggtgatcttagctccaaccagggttgtcgctgctgaaatggaggaggcccttagagggcttccagtgcgttatatgacaacagcagtcaatgtcacccactctggaacagaaatcgtcgacttaatgtgccatgccaccttcacttcacgtctactacagccaatcagagtccccaactataatctgtatattatggatgaggcccacttcacagatccctcaagtatagcagcaagaggatacatttcaacaagggttgagatgggcgaggcggctgccatcttcatgaccgccacgccaccaggaacccgtgacgcatttccggactccaactcaccaattatggacaccgaagtggaagtcccagagagagcctggagctcaggctttgattgggtgacggatcattttggaaaaacagtttggtttgttccaagcgtgaggaacggcaatgagatcgcagcttgtctgacaaaggctggaaaacgggtcatacagctcagcagaaagacttttgagacagagttccagaaaacaaaacatcaagagtgggactttgtcgtgacaactgacatttcagagatgggcgccaactttaaagctgaccgtgtcatagattccaggagatgcctaaagccggtcatacttgatggcgagagagtcattctggctggacccatgcctgtcacacatgccagcgctgcccagaggagggggcgcataggcaggaatcccaacaaacctggagatgagtatctgtatggaggtgggtgcgcagagactgacgaagaccatgcacactggcttgaagcaagaatgctccttgacaatatttacctccaagatggcctcatagcctcgctctatcgacctgaggccgacaaagtagcagccattgagggagagttcaagcttaggacggagcaaaggaagacctttgtggaactcatgaaaagaggagatcttcctgtttggctggcctatcaggttgcatctgccggaataacctacacagatagaagatggtgctttgatggcacgaccaacaacaccataatggaagacagtgtgccggcagaggtgtggaccagacacggagagaaaagagtgctcaaaccgaggtggatggacgccagagtttgttcagatcatgcggccctgaagtcattcaaggagtttgccgctgggaaaagaggagcggcttttggagtgatggaagccctgggaacactgccaggacacatgacagagagattccaggaagccattgacaacctcgctgtgctcatgcgggcagagactggaagcaggccttacaaagccgcggcggcccaattgccggagaccctagagaccataatgcttttggggttgctgggaacagtctcgctgggaatcttcttcgtcttgatgaggaacaagggcatagggaagatgggctttggaatggtgactcttggggccagcgcatggctcatgtggctctcggaaattgagccagccagaattgcatgtgtcctcattgttgtgttcctattgctggtggtgctcatacctgagccagaaaagcaaagatctccccaggacaaccaaatggcaatcatcatcatggtagcagtaggtcttctgggcttgattaccgccaatgaactcggatggttggagagaacaaagagtgacctaagccatctaatgggaaggagagaggagggggcaaccataggattctcaatggacattgacctgcggccagcctcagcttgggccatctatgctgccttgacaactttcattaccccagccgtccaacatgcagtgaccacctcatacaacaactactccttaatggcgatggccacgcaagctggagtgttgtttggcatgggcaaagggatgccattctacgcatgggactttggagtcccgctgctaatgataggttgctactcacaattaacacccctgaccctaatagtggccatcattttgctcgtggcgcactacatgtacttgatcccagggctgcaggcagcagctgcgcgtgctgcccagaagagaacggcagctggcatcatgaagaaccctgttgtggatggaatagtggtgactgacattgacacaatgacaattgacccccaagtggagaaaaagatgggacaggtgctactcatagcagtagccgtctccagcgccatactgtcgcggaccgcctgggggtggggggaggctggggctctgatcacagccgcaacttccactttgtgggaaggctctccgaacaagtactggaactcctctacagccacttcactgtgtaacatttttaggggaagttacttggctggagcttctctaatctacacagtaacaagaaacgctggcttggtcaagagacgtgggggtggaacaggagagaccctgggagagaaatggaaggcccgcttgaaccagatgtcggccctggagttctactcctacaaaaagtcaggcatcaccgaggtgtgcagagaagaggcccgccgcgccctcaaggacggtgtggcaacgggaggccatgctgtgtcccgaggaagtgcaaagctgagatggttggtggagcggggatacctgcagccctatggaaaggtcattgatcttggatgtggcagagggggctggagttactacgtcgccaccatccgcaaagttcaagaagtgaaaggatacacaaaaggaggccctggtcatgaagaacccgtgttggtgcaaagctatgggtggaacatagtccgtcttaagagtggggtggacgtctttcatatggcggctgagccgtgtgacacgttgctgtgtgacataggtgagtcatcatctagtcctgaagtggaagaagcacggacgctcagagtcctctccatggtgggggattggcttgaaaaaagaccaggagccttttgtataaaagtgttgtgcccatacaccagcactatgatggaaaccctggagcgactgcagcgtaggtatgggggaggactggtcagagtgccactctcccgcaactctacacatgagatgtactgggtctctggagcgaaaagcaacaccataaaaagtgtgtccaccacgagccagctcctcttggggcgcatggacgggcctaggaggccagtgaaatatgaggaggatgtgaatctcggctctggcacgcgggctgtggtaagctgcgctgaagctcccaacatgaagatcattggtaaccgcattgaaaggatccgcagtgagcacgcggaaacgtggttctttgacgagaaccacccatataggacatgggcttaccatggaagctatgaggcccccacacaagggtcagcgtcctctctaataaacggggttgtcaggctcctgtcaaaaccctgggatgtggtgactggagtcacaggaatagccatgaccgacaccacaccgtatggtcagcaaagagttttcaaggaaaaagtggacactagggtgccagacccccaagaaggcactcgtcaggttatgagcatggtctcttcctggttgtggaaagagctaggcaaacacaaacggccacgagtctgcaccaaagaagagttcatcaacaaggttcgtagcaatgcagcattaggggcaatatttgaagaggaaaaagagtggaagactgcagtggaagctgtgaacgatccaaggttctgggctctagtggacaaggaaagagagcaccacctgagaggagagtgccagagctgtgtgtacaacatgatgggaaaaagagaaaagaaacaaggggaatttggaaaggccaagggcagccgcgccatctggtatatgtggctaggggctagatttctagagttcgaagcccttggattcttgaacgaggatcactggatggggagagagaactcaggaggtggtgttgaagggctgggattacaaagactcggatatgtcctagaagagatgagtcgtataccaggaggaaggatgtatgcagatgacactgctggctgggacacccgcattagcaggtttgatctggagaatgaagctctaatcaccaaccaaatggagaaagggcacagggccttggcattggccataatcaagtacacataccaaaacaaagtggtaaaggtccttagaccagctgaaaaagggaaaacagttatggacattatttcgagacaagaccaaagggggagcggacaagttgtcacttacgctcttaacacattcaccaacctagtggtgcaactcattcggaatatggaggctgaggaagttctagagatgcaagacttgtggctgctgcggaggtcagagaaagtgaccaactggttgcagagcaacggatgggataggctcaaacgaatggcagtcagtggagatgattgcgttgtgaagccaattgatgataggtttgcacatgccctcaggttcttgaatgatatgggaaaagttaggaaggacacacaagagtggaaaccctcaactggatgggacaactgggaagaagttccgttttgctcccaccacttcaacaagctccatctcaaggacgggaggtccattgtggttccctgccgccaccaagatgaactgattggccgggcccgcgtctctccaggggcgggatggagcatccgggagactgcttgcctagcaaaatcatatgcgcaaatgtggcagctcctttatttccacagaagggacctccgactgatggccaatgccatttgttcatctgtgccagttgactgggttccaactgggagaactacctggtcaatccatggaaagggagaatggatgaccactgaagacatgcttgtggtgtggaacagagtgtggattgaggagaacgaccacatggaagacaagaccccagttacgaaatggacagacattccctatttgggaaaaagggaagacttgtggtgtggatctctcatagggcacagaccgcgcaccacctgggctgagaacattaaaaacacagtcaacatggtgcgcaggatcataggtgatgaagaaaagtacatggactacctatccacccaagttcgctacttgggtgaagaagggtctacacctggagtgctgtaa

SEQ ID NO: 11 - DNA, 10807 bp, synthetic construct
  source 1..10807: mol_type = other DNA
agttgttgatctgtgtgaatcagactgcgacagttcgagtttgaagcgaaagctagcaacagtatcaacaggttttattttggatttggaaacgagagtttctggtcatgaaaaacccaaaaaagaaatccggaggattccggattgtcaatatgctaaaacgcggagtagcccgtgtgagcccattcgggggactgaagcgcctgcctgcaggcctgctgctgggccacggcccaatcagaatggtgctggccatcctggccttcctgaggtttacagccatcaagccctctctgggcctgatcaacagatggggcagcgtgggcaagaaggaggctatggagacaatcaagaagttcaagaaggatctggccgccatgctgcggatcatcaatgccagaaaggagaagaagcggagaggagcagacacatccgtgggaatcgtgggcctgctgctgaccacagctatggccgcagaggtgaccaggaggggctctgcctactatatgtacctggaccgcaacgatgccggcaaggccatcagcttccctaccacactgggcatgaataagtgttacatccagatcatggatctgggccacatgtgcgacgccaccatgagctatgagtgtcccatgctggatgagggcgtggagcctgacgatgtggactgctggtgtaacaccacatccacctgggtggtgtacggcacatgtcaccacaagaagggagaggcacggagatctaggcgcgcagtgaccctgccaagccactccacaaggaagctgcagacccgctctcagacatggctggagagccgggagtataccaagcacctgatccgggtggagaattggatctttagaaacccaggcttcgcactggctgccgccgccatcgcatggctgctgggcagctccacctcccagaaagtgatctacctggtcatgatcctgctgatcgcccccgcctattctatcaggtgcatcggcgtgagcaaccgcgatttcgtggagggcatgtctggaggcacctgggtggacgtggtgctggagcacggaggatgcgtgaccgtgatggcccaggataagccaacagtggacatcgagctggtgaccacaaccgtgtccaatatggccgaggtgagatcttactgctatgaggcctctatcagcgacatggcctccgattctaggtgtccaacccagggagaggcctacctggacaagcagtccgatacccagtacgtgtgcaagcggacactggtggacagaggctggggcaacggctgtggcctgtttggcaagggctctctggtgacctgcgccaagttcgcctgtagcaagaagatgaccggcaagtccatccagcccgagaatctggagtaccgcatcatgctgtccgtgcacggctcccagcactctggcatgatcgtgaatgataccggccacgagacagacgagaacagagccaaggtggagatcacccccaatagccctagggccgaggccacactgggaggatttggctccctgggcctggattgcgagccaaggaccggcctggacttcagcgatctgtactatctgacaatgaacaataagcactggctggtgcacaaggagtggtttcacgacatccccctgccttggcacgcaggagcagacacaggcaccccacactggaacaataaggaggccctggtggagttcaaggacgcccacgccaagagacagacagtggtggtgctgggcagccaggagggagcagtgcacaccgccctggcaggcgccctggaggccgagatggatggagcaaagggcaggctgtctagcggacacctgaagtgccggctgaagatggacaagctgagactgaagggcgtgagctactccctgtgcacagccgccttcaccttcaccaagatccctgccgagacactgcacggcaccgtgaccgtggagctgcagtatgccggcacagatggcccttgtaaggtgcccgcccagatggccgtggacatgcagacactgacccccgtgggcagactgatcaccgccaaccctgtgatcacagagtctaccgagaatagcaagatgatgctggagctggacccccctttcggcgactcctacatcgtgatcggcgtgggcgagaagaagatcacccaccactggcacaggtctggcagcaccatcggcaaggcctttgaggccacagtgcggggagcaaagagaatggccgtgctgggcgacaccgcatgggatttcggctctgtgggaggcgccctgaacagcctgggcaagggcatccaccagatcttcggcgccgcctttaagagcctgttcggcggcatgagctggttttcccagatcctgatcggcaccctgctgatgtggctgggcctgaacacaaagaatggctccatctctctgatgtgcctggccctgggaggcgtgctgatcttcctgtccaccgccgtgtctgccgatgtgggatgcagcgtggacttttccaagaaggagacacggtgtggcacaggcgtgttcgtgtacaacgatgtggaggcctggagggaccgctacaagtatcacccagattccccacggagactggctgccgccgtgaagcaggcctgggaggacggcatctgtggcatcagcagcgtgagccggatggagaatatcatgtggcgctctgtggagggcgagctgaatgccatcctggaggagaacggagtgcagctgaccgtggtggtgggcagcgtgaagaaccctatgtggaggggaccacagcgcctgccagtgcccgtgaatgagctgcctcacggctggaaggcctggggcaagtcttactttgtgagagccgccaagaccaacaatagcttcgtggtggacggcgatacactgaaggagtgcccactgaagcacagggcctggaactcctttctggtggaggaccacggcttcggcgtgtttcacacatccgtgtggctgaaggtgagagaggattactctctggagtgtgaccctgccgtgatcggcaccgcagtgaagggcaaggaggcagtgcactctgatctgggctattggatcgagagcgagaagaacgacacatggaggctgaagcgcgcccacctgatcgagatgaagacctgcgagtggccaaagtcccacacactgtggaccgatggcatcgaggagtctgacctgatcatccccaagtccctggccggccctctgtctcaccacaataccagagagggctacagaacacagatgaagggcccctggcacagcgaggagctggagatcaggttcgaggagtgccccggtaccaaggtgcacgtggaggagacatgtggcaccaggggcccctctctgcgcagcacaaccgccagcggcagagtgatcgaggagtggtgctgtcgcgagtgcaccatgccacccctgtcctttcgcgccaaggacggctgttggtatggcatggagatccggcctagaaaggagccagagtccaacctggtgcggtctatggtgaccgccggctccacagaccacatggatcacttctctctgggcgtgctggtcatcctgctgatggtgcaggagggcctgaagaagagaatgacaaccaagatcatcatcagcaccagcatggccgtgctggtggcaatgatcctgggaggcttttctatgagcgatctggccaagctggccatcctgatgggcgccaccttcgccgagatgaacacaggaggcgacgtggcacacctggccctgatcgccgcctttaaggtgaggcctgccctgctggtgagcttcatctttagggccaattggacaccacgcgagtccatgctgctggccctggcatcttgcctgctgcagaccgccatctccgccctggagggcgatctgatggtgctgatcaacggattcgcactggcatggctggcaatccgggctatggtggtgcccagaaccgacaatatcacactggcaatcctggccgccctgacccctctggcccggggcaccctgctggtggcatggagagcaggcctggcaacatgcggcggctttatgctgctgagcctgaagggcaagggctccgtgaagaagaacctgccattcgtgatggcactgggcctgaccgccgtgcgcctggtggaccccatcaatgtggtgggcctgctgctgctgacaaggtctggcaagcgcagctggcctccatccgaggtgctgaccgcagtgggcctgatctgtgcactggcaggaggatttgcaaaggcagacatcgagatggcaggacctatggccgcagtgggcctgctgatcgtgtcctacgtggtgtccggcaagtctgtggacatgtatatcgagagagccggcgacatcacctgggagaaggacgccgaggtgacaggcaactctcctaggctggacgtggccctggatgagtctggcgactttagcctggtggaggacgatggcccccctatgcgggagatcatcctgaaggtggtgctgatgacaatctgcggcatgaatccaatcgcaatccctttcgccgcaggagcatggtacgtgtatgtgaagaccggcaagcggagcggcgccctgtgggatgtgcctgccccaaaggaggtgaagaagggcgagacaaccgacggcgtgtacagagtgatgaccaggcgcctgctgggcagcacacaagtgggagtgggcgtgatgcaggagggcgtgttccacaccatgtggcacgtgacaaagggctccgccctgcggtctggagagggcagactggacccttactggggcgatgtgaagcaggacctggtgtcctattgtggaccctggaagctggatgcagcatgggacggacactctgaggtgcagctgctggccgtgccacccggcgagagggcaaggaacatccagaccctgcccggcatctttaagacaaaggacggcgacatcggagcagtggccctggattaccctgcaggcacctccggctctccaatcctggacaagtgcggcagagtgatcggcctgtacggcaatggcgtggtcatcaagaacggcagctacgtgagcgccatcacccagggccggagagaggaggagacaccagtggagtgtttcgagccctccatgctgaagaagaagcagctgaccgtgctggatctgcaccccggcgcaggcaagacaaggcgcgtgctgcctgagatcgtgcgcgaggccatcaagacccggctgcgtacggtgatcttagctccaaccagggttgtcgctgctgaaatggaggaggcccttagagggcttccagtgcgttatatgacaacagcagtcaatgtcacccactctggaacagaaatcgtcgacttaatgtgccatgccaccttcacttcacgtctactacagccaatcagagtccccaactataatctgtatattatggatgaggcccacttcacagatccctcaagtatagcagcaagaggatacatttcaacaagggttgagatgggcgaggcggctgccatcttcatgaccgccacgccaccaggaacccgtgacgcatttccggactccaactcaccaattatggacaccgaagtggaagtcccagagagagcctggagctcaggctttgattgggtgacggatcattttggaaaaacagtttggtttgttccaagcgtgaggaacggcaatgagatcgcagcttgtctgacaaaggctggaaaacgggtcatacagctcagcagaaagacttttgagacagagttccagaaaacaaaacatcaagagtgggactttgtcgtgacaactgacatttcagagatgggcgccaactttaaagctgaccgtgtcatagattccaggagatgcctaaagccggtcatacttgatggcgagagagtcattctggctggacccatgcctgtcacacatgccagcgctgcccagaggagggggcgcataggcaggaatcccaacaaacctggagatgagtatctgtatggaggtgggtgcgcagagactgacgaagaccatgcacactggcttgaagcaagaatgctccttgacaatatttacctccaagatggcctcatagcctcgctctatcgacctgaggccgacaaagtagcagccattgagggagagttcaagcttaggacggagcaaaggaagacctttgtggaactcatgaaaagaggagatcttcctgtttggctggcctatcaggttgcatctgccggaataacctacacagatagaagatggtgctttgatggcacgaccaacaacaccataatggaagacagtgtgccggcagaggtgtggaccagacacggagagaaaagagtgctcaaaccgaggtggatggacgccagagtttgttcagatcatgcggccctgaagtcattcaaggagtttgccgctgggaaaagaggagcggcttttggagtgatggaagccctgggaacactgccaggacacatgacagagagattccaggaagccattgacaacctcgctgtgctcatgcgggcagagactggaagcaggccttacaaagccgcggcggcccaattgccggagaccctagagaccataatgcttttggggttgctgggaacagtctcgctgggaatcttcttcgtcttgatgaggaacaagggcatagggaagatgggctttggaatggtgactcttggggccagcgcatggctcatgtggctctcggaaattgagccagccagaattgcatgtgtcctcattgttgtgttcctattgctggtggtgctcatacctgagccagaaaagcaaagatctccccaggacaaccaaatggcaatcatcatcatggtagcagtaggtcttctgggcttgattaccgccaatgaactcggatggttggagagaacaaagagtgacctaagccatctaatgggaaggagagaggagggggcaaccataggattctcaatggacattgacctgcggccagcctcagcttgggccatctatgctgccttgacaactttcattaccccagccgtccaacatgcagtgaccacctcatacaacaactactccttaatggcgatggccacgcaagctggagtgttgtttggcatgggcaaagggatgccattctacgcatgggactttggagtcccgctgctaatgataggttgctactcacaattaacacccctgaccctaatagtggccatcattttgctcgtggcgcactacatgtacttgatcccagggctgcaggcagcagctgcgcgtgctgcccagaagagaacggcagctggcatcatgaagaaccctgttgtggatggaatagtggtgactgacattgacacaatgacaattgacccccaagtggagaaaaagatgggacaggtgctactcatagcagtagccgtctccagcgccatactgtcgcggaccgcctgggggtggggggaggctggggctctgatcacagccgcaacttccactttgtgggaaggctctccgaacaagtactggaactcctctacagccacttcactgtgtaacatttttaggggaagttacttggctggagcttctctaatctacacagtaacaagaaacgctggcttggtcaagagacgtgggggtggaacaggagagaccctgggagagaaatggaaggcccgcttgaaccagatgtcggccctggagttctactcctacaaaaagtcaggcatcaccgaggtgtgcagagaagaggcccgccgcgccctcaaggacggtgtggcaacgggaggccatgctgtgtcccgaggaagtgcaaagctgagatggttggtggagcggggatacctgcagccctatggaaaggtcattgatcttggatgtggcagagggggctggagttactacgtcgccaccatccgcaaagttcaagaagtgaaaggatacacaaaaggaggccctggtcatgaagaacccgtgttggtgcaaagctatgggtggaacatagtccgtcttaagagtggggtggacgtctttcatatggcggctgagccgtgtgacacgttgctgtgtgacataggtgagtcatcatctagtcctgaagtggaagaagcacggacgctcagagtcctctccatggtgggggattggcttgaaaaaagaccaggagccttttgtataaaagtgttgtgcccatacaccagcactatgatggaaaccctggagcgactgcagcgtaggtatgggggaggactggtcagagtgccactctcccgcaactctacacatgagatgtactgggtctctggagcgaaaagcaacaccataaaaagtgtgtccaccacgagccagctcctcttggggcgcatggacgggcctaggaggccagtgaaatatgaggaggatgtgaatctcggctctggcacgcgggctgtggtaagctgcgctgaagctcccaacatgaagatcattggtaaccgcattgaaaggatccgcagtgagcacgcggaaacgtggttctttgacgagaaccacccatataggacatgggcttaccatggaagctatgaggcccccacacaagggtcagcgtcctctctaataaacggggttgtcaggctcctgtcaaaaccctgggatgtggtgactggagtcacaggaatagccatgaccgacaccacaccgtatggtcagcaaagagttttcaaggaaaaagtggacactagggtgccagacccccaagaaggcactcgtcaggttatgagcatggtctcttcctggttgtggaaagagctaggcaaacacaaacggccacgagtctgcaccaaagaagagttcatcaacaaggttcgtagcaatgcagcattaggggcaatatttgaagaggaaaaagagtggaagactgcagtggaagctgtgaacgatccaaggttctgggctctagtggacaaggaaagagagcaccacctgagaggagagtgccagagctgtgtgtacaacatgatgggaaaaagagaaaagaaacaaggggaatttggaaaggccaagggcagccgcgccatctggtatatgtggctaggggctagatttctagagttcgaagcccttggattcttgaacgaggatcactggatggggagagagaactcaggaggtggtgttgaagggctgggattacaaagactcggatatgtcctagaagagatgagtcgtataccaggaggaaggatgtatgcagatgacactgctggctgggacacccgcattagcaggtttgatctggagaatgaagctctaatcaccaaccaaatggagaaagggcacagggccttggcattggccataatcaagtacacataccaaaacaaagtggtaaaggtccttagaccagctgaaaaagggaaaacagttatggacattatttcgagacaagaccaaagggggagcggacaagttgtcacttacgctcttaacacattcaccaacctagtggtgcaactcattcggaatatggaggctgaggaagttctagagatgcaagacttgtggctgctgcggaggtcagagaaagtgaccaactggttgcagagcaacggatgggataggctcaaacgaatggcagtcagtggagatgattgcgttgtgaagccaattgatgataggtttgcacatgccctcaggttcttgaatgatatgggaaaagttaggaaggacacacaagagtggaaaccctcaactggatgggacaactgggaagaagttccgttttgctcccaccacttcaacaagctccatctcaaggacgggaggtccattgtggttccctgccgccaccaagatgaactgattggccgggcccgcgtctctccaggggcgggatggagcatccgggagactgcttgcctagcaaaatcatatgcgcaaatgtggcagctcctttatttccacagaagggacctccgactgatggccaatgccatttgttcatctgtgccagttgactgggttccaactgggagaactacctggtcaatccatggaaagggagaatggatgaccactgaagacatgcttgtggtgtggaacagagtgtggattgaggagaacgaccacatggaagacaagaccccagttacgaaatggacagacattccctatttgggaaaaagggaagacttgtggtgtggatctctcatagggcacagaccgcgcaccacctgggctgagaacattaaaaacacagtcaacatggtgcgcaggatcataggtgatgaagaaaagtacatggactacctatccacccaagttcgctacttgggtgaagaagggtctacacctggagtgctgtaagcaccaatcttaatgttgtcaggcctgctagtcagccacagcttggggaaagctgtgcagcctgtgacccccccaggagaagctgggaaaccaagcctatagtcaggccgagaacgccatggcacggaagaagccatgctgcctgtgagcccctcagaggacactgagtcaaaaaaccccacgcgcttggaggcgcaggatgggaaaagaaggtggcgaccttccccacccttcaatctggggcctgaactggagatcagctgtggatctccagaagagggactagtggttagaggagaccccccggaaaacgcaaaacagcatattgacgctgggaaagaccagagactccatgagtttccaccacgctggccgccaggcacagatcgccgaatagcggcggccggtgtggggaaatccatgggtct

SEQ ID NO: 12 - DNA, 10272 bp, synthetic construct
  source 1..10272: mol_type = other DNA
atgaaaaacccaaaaaagaaatccggaggattccggattgtcaatatgctaaaacgcggagtagcccgtgtgagcccattcgggggactgaagcgcctgcctgcaggcctgctgctgggccacggcccaatcagaatggtgctggccatcctggccttcctgaggtttacagccatcaagccctctctgggcctgatcaacagatggggcagcgtgggcaagaaggaggctatggagacaatcaagaagttcaagaaggatctggccgccatgctgcggatcatcaatgccagaaaggagaagaagcggagaggagcagacacatccgtgggaatcgtgggcctgctgctgaccacagctatggccgcagaggtgaccaggaggggctctgcctactatatgtacctggaccgcaacgatgccggcaaggccatcagcttccctaccacactgggcatgaataagtgttacatccagatcatggatctgggccacatgtgcgacgccaccatgagctatgagtgtcccatgctggatgagggcgtggagcctgacgatgtggactgctggtgtaacaccacatccacctgggtggtgtacggcacatgtcaccacaagaagggagaggcacggagatctaggcgcgcagtgaccctgccaagccactccacaaggaagctgcagacccgctctcagacatggctggagagccgggagtataccaagcacctgatccgggtggagaattggatctttagaaacccaggcttcgcactggctgccgccgccatcgcatggctgctgggcagctccacctcccagaaagtgatctacctggtcatgatcctgctgatcgcccccgcctattctatcaggtgcatcggcgtgagcaaccgcgatttcgtggagggcatgtctggaggcacctgggtggacgtggtgctggagcacggaggatgcgtgaccgtgatggcccaggataagccaacagtggacatcgagctggtgaccacaaccgtgtccaatatggccgaggtgagatcttactgctatgaggcctctatcagcgacatggcctccgattctaggtgtccaacccagggagaggcctacctggacaagcagtccgatacccagtacgtgtgcaagcggacactggtggacagaggctggggcaacggctgtggcctgtttggcaagggctctctggtgacctgcgccaagttcgcctgtagcaagaagatgaccggcaagtccatccagcccgagaatctggagtaccgcatcatgctgtccgtgcacggctcccagcactctggcatgatcgtgaatgataccggccacgagacagacgagaacagagccaaggtggagatcacccccaatagccctagggccgaggccacactgggaggatttggctccctgggcctggattgcgagccaaggaccggcctggacttcagcgatctgtactatctgacaatgaacaataagcactggctggtgcacaaggagtggtttcacgacatccccctgccttggcacgcaggagcagacacaggcaccccacactggaacaataaggaggccctggtggagttcaaggacgcccacgccaagagacagacagtggtggtgctgggcagccaggagggagcagtgcacaccgccctggcaggcgccctggaggccgagatggatggagcaaagggcaggctgtctagcggacacctgaagtgccggctgaagatggacaagctgagactgaagggcgtgagctactccctgtgcacagccgccttcaccttcaccaagatccctgccgagacactgcacggcaccgtgaccgtggagctgcagtatgccggcacagatggcccttgtaaggtgcccgcccagatggccgtggacatgcagacactgacccccgtgggcagactgatcaccgccaaccctgtgatcacagagtctaccgagaatagcaagatgatgctggagctggacccccctttcggcgactcctacatcgtgatcggcgtgggcgagaagaagatcacccaccactggcacaggtctggcagcaccatcggcaaggcctttgaggccacagtgcggggagcaaagagaatggccgtgctgggcgacaccgcatgggatttcggctctgtgggaggcgccctgaacagcctgggcaagggcatccaccagatcttcggcgccgcctttaagagcctgttcggcggcatgagctggttttcccagatcctgatcggcaccctgctgatgtggctgggcctgaacacaaagaatggctccatctctctgatgtgcctggccctgggaggcgtgctgatcttcctgtccaccgccgtgtctgccgatgtgggatgcagcgtggacttttccaagaaggagacacggtgtggcacaggcgtgttcgtgtacaacgatgtggaggcctggagggaccgctacaagtatcacccagattccccacggagactggctgccgccgtgaagcaggcctgggaggacggcatctgtggcatcagcagcgtgagccggatggagaatatcatgtggcgctctgtggagggcgagctgaatgccatcctggaggagaacggagtgcagctgaccgtggtggtgggcagcgtgaagaaccctatgtggaggggaccacagcgcctgccagtgcccgtgaatgagctgcctcacggctggaaggcctggggcaagtcttactttgtgagagccgccaagaccaacaatagcttcgtggtggacggcgatacactgaaggagtgcccactgaagcacagggcctggaactcctttctggtggaggaccacggcttcggcgtgtttcacacatccgtgtggctgaaggtgagagaggattactctctggagtgtgaccctgccgtgatcggcaccgcagtgaagggcaaggaggcagtgcactctgatctgggctattggatcgagagcgagaagaacgacacatggaggctgaagcgcgcccacctgatcgagatgaagacctgcgagtggccaaagtcccacacactgtggaccgatggcatcgaggagtctgacctgatcatccccaagtccctggccggccctctgtctcaccacaataccagagagggctacagaacacagatgaagggcccctggcacagcgaggagctggagatcaggttcgaggagtgccccggtaccaaggtgcacgtggaggagacatgtggcaccaggggcccctctctgcgcagcacaaccgccagcggcagagtgatcgaggagtggtgctgtcgcgagtgcaccatgccacccctgtcctttcgcgccaaggacggctgttggtatggcatggagatccggcctagaaaggagccagagtccaacctggtgcggtctatggtgaccgccggctccacagaccacatggatcacttctctctgggcgtgctggtcatcctgctgatggtgcaggagggcctgaagaagagaatgacaaccaagatcatcatcagcaccagcatggccgtgctggtggcaatgatcctgggaggcttttctatgagcgatctggccaagctggccatcctgatgggcgccaccttcgccgagatgaacacaggaggcgacgtggcacacctggccctgatcgccgcctttaaggtgaggcctgccctgctggtgagcttcatctttagggccaattggacaccacgcgagtccatgctgctggccctggcatcttgcctgctgcagaccgccatctccgccctggagggcgatctgatggtgctgatcaacggattcgcactggcatggctggcaatccgggctatggtggtgcccagaaccgacaatatcacactggcaatcctggccgccctgacccctctggcccggggcaccctgctggtggcatggagagcaggcctggcaacatgcggcggctttatgctgctgagcctgaagggcaagggctccgtgaagaagaacctgccattcgtgatggcactgggcctgaccgccgtgcgcctggtggaccccatcaatgtggtgggcctgctgctgctgacaaggtctggcaagcgcagctggcctccatccgaggtgctgaccgcagtgggcctgatctgtgcactggcaggaggatttgcaaaggcagacatcgagatggcaggacctatggccgcagtgggcctgctgatcgtgtcctacgtggtgtccggcaagtctgtggacatgtatatcgagagagccggcgacatcacctgggagaaggacgccgaggtgacaggcaactctcctaggctggacgtggccctggatgagtctggcgactttagcctggtggaggacgatggcccccctatgcgggagatcatcctgaaggtggtgctgatgacaatctgcggcatgaatccaatcgcaatccctttcgccgcaggagcatggtacgtgtatgtgaagaccggcaagcggagcggcgccctgtgggatgtgcctgccccaaaggaggtgaagaagggcgagacaaccgacggcgtgtacagagtgatgaccaggcgcctgctgggcagcacacaagtgggagtgggcgtgatgcaggagggcgtgttccacaccatgtggcacgtgacaaagggctccgccctgcggtctggagagggcagactggacccttactggggcgatgtgaagcaggacctggtgtcctattgtggaccctggaagctggatgcagcatgggacggacactctgaggtgcagctgctggccgtgccacccggcgagagggcaaggaacatccagaccctgcccggcatctttaagacaaaggacggcgacatcggagcagtggccctggattaccctgcaggcacctccggctctccaatcctggacaagtgcggcagagtgatcggcctgtacggcaatggcgtggtcatcaagaacggcagctacgtgagcgccatcacccagggccggagagaggaggagacaccagtggagtgtttcgagccctccatgctgaagaagaagcagctgaccgtgctggatctgcaccccggcgcaggcaagacaaggcgcgtgctgcctgagatcgtgcgcgaggccatcaagacccggctgcgtacggtgatcttagctccaaccagggttgtcgctgctgaaatggaggaggcccttagagggcttccagtgcgttatatgacaacagcagtcaatgtcacccactctggaacagaaatcgtcgacttaatgtgccatgccaccttcacttcacgtctactacagccaatcagagtccccaactataatctgtatattatggatgaggcccacttcacagatccctcaagtatagcagcaagaggatacatttcaacaagggttgagatgggcgaggcggctgccatcttcatgaccgccacgccaccaggaacccgtgacgcatttccggactccaactcaccaattatggacaccgaagtggaagtcccagagagagcctggagctcaggctttgattgggtgacggatcattttggaaaaacagtttggtttgttccaagcgtgaggaacggcaatgagatcgcagcttgtctgacaaaggctggaaaacgggtcatacagctcagcagaaagacttttgagacagagttccagaaaacaaaacatcaagagtgggactttgtcgtgacaactgacatttcagagatgggcgccaactttaaagctgaccgtgtcatagattccaggagatgcctaaagccggtcatacttgatggcgagagagtcattctggctggacccatgcctgtcacacatgccagcgctgcccagaggagggggcgcataggcaggaatcccaacaaacctggagatgagtatctgtatggaggtgggtgcgcagagactgacgaagaccatgcacactggcttgaagcaagaatgctccttgacaatatttacctccaagatggcctcatagcctcgctctatcgacctgaggccgacaaagtagcagccattgagggagagttcaagcttaggacggagcaaaggaagacctttgtggaactcatgaaaagaggagatcttcctgtttggctggcctatcaggttgcatctgccggaataacctacacagatagaagatggtgctttgatggcacgaccaacaacaccataatggaagacagtgtgccggcagaggtgtggaccagacacggagagaaaagagtgctcaaaccgaggtggatggacgccagagtttgttcagatcatgcggccctgaagtcattcaaggagtttgccgctgggaaaagaggagcggcttttggagtgatggaagccctgggaacactgccaggacacatgacagagagattccaggaagccattgacaacctcgctgtgctcatgcgggcagagactggaagcaggccttacaaagccgcggcggcccaattgccggagaccctagagaccataatgcttttggggttgctgggaacagtctcgctgggaatcttcttcgtcttgatgaggaacaagggcatagggaagatgggctttggaatggtgactcttggggccagcgcatggctcatgtggctctcggaaattgagccagccagaattgcatgtgtcctcattgttgtgttcctattgctggtggtgctcatacctgagccagaaaagcaaagatctccccaggacaaccaaatggcaatcatcatcatggtagcagtaggtcttctgggcttgattaccgccaatgaactcggatggttggagagaacaaagagtgacctaagccatctaatgggaaggagagaggagggggcaaccataggattctcaatggacattgacctgcggccagcctcagcttgggccatctatgctgccttgacaactttcattaccccagccgtccaacatgcagtgaccacctcatacaacaactactccttaatggcgatggccacgcaagctggagtgttgtttggcatgggcaaagggatgccattctacgcatgggactttggagtcccgctgctaatgataggttgctactcacaattaacacccctgaccctaatagtggccatcattttgctcgtggcgcactacatgtacttgatcccagggctgcaggcagcagctgcgcgtgctgcccagaagagaacggcagctggcatcatgaagaaccctgttgtggatggaatagtggtgactgacattgacacaatgacaattgacccccaagtggagaaaaagatgggacaggtgctactcatagcagtagccgtctccagcgccatactgtcgcggaccgcctgggggtggggggaggctggggctctgatcacagccgcaacttccactttgtgggaaggctctccgaacaagtactggaactcctctacagccacttcactgtgtaacatttttaggggaagttacttggctggagcttctctaatctacacagtaacaagaaacgctggcttggtcaagagacgtgggggtggaacaggagagaccctgggagagaaatggaaggcccgcttgaaccagatgtcggccctggagttctactcctacaaaaagtcaggcatcaccgaggtgtgcagagaagaggcccgccgcgccctcaaggacggtgtggcaacgggaggccatgctgtgtcccgaggaagtgcaaagctgagatggttggtggagcggggatacctgcagccctatggaaaggtcattgatcttggatgtggcagagggggctggagttactacgtcgccaccatccgcaaagttcaagaagtgaaaggatacacaaaaggaggccctggtcatgaagaacccgtgttggtgcaaagctatgggtggaacatagtccgtcttaagagtggggtggacgtctttcatatggcggctgagccgtgtgacacgttgctgtgtgacataggtgagtcatcatctagtcctgaagtggaagaagcacggacgctcagagtcctctccatggtgggggattggcttgaaaaaagaccaggagccttttgtataaaagtgttgtgcccatacaccagcactatgatggaaaccctggagcgactgcagcgtaggtatgggggaggactggtcagagtgccactctcccgcaactctacacatgagatgtactgggtctctggagcgaaaagcaacaccataaaaagtgtgtccaccacgagccagctcctcttggggcgcatggacgggcctaggaggccagtgaaatatgaggaggatgtgaatctcggctctggcacgcgggctgtggtaagctgcgctgaagctcccaacatgaagatcattggtaaccgcattgaaaggatccgcagtgagcacgcggaaacgtggttctttgacgagaaccacccatataggacatgggcttaccatggaagctatgaggcccccacacaagggtcagcgtcctctctaataaacggggttgtcaggctcctgtcaaaaccctgggatgtggtgactggagtcacaggaatagccatgaccgacaccacaccgtatggtcagcaaagagttttcaaggaaaaagtggacactagggtgccagacccccaagaaggcactcgtcaggttatgagcatggtctcttcctggttgtggaaagagctaggcaaacacaaacggccacgagtctgcaccaaagaagagttcatcaacaaggttcgtagcaatgcagcattaggggcaatatttgaagaggaaaaagagtggaagactgcagtggaagctgtgaacgatccaaggttctgggctctagtggacaaggaaagagagcaccacctgagaggagagtgccagagctgtgtgtacaacatgatgggaaaaagagaaaagaaacaaggggaatttggaaaggccaagggcagccgcgccatctggtatatgtggctaggggctagatttctagagttcgaagcccttggattcttgaacgaggatcactggatggggagagagaactcaggaggtggtgttgaagggctgggattacaaagactcggatatgtcctagaagagatgagtcgtataccaggaggaaggatgtatgcagatgacactgctggctgggacacccgcattagcaggtttgatctggagaatgaagctctaatcaccaaccaaatggagaaagggcacagggccttggcattggccataatcaagtacacataccaaaacaaagtggtaaaggtccttagaccagctgaaaaagggaaaacagttatggacattatttcgagacaagaccaaagggggagcggacaagttgtcacttacgctcttaacacattcaccaacctagtggtgcaactcattcggaatatggaggctgaggaagttctagagatgcaagacttgtggctgctgcggaggtcagagaaagtgaccaactggttgcagagcaacggatgggataggctcaaacgaatggcagtcagtggagatgattgcgttgtgaagccaattgatgataggtttgcacatgccctcaggttcttgaatgatatgggaaaagttaggaaggacacacaagagtggaaaccctcaactggatgggacaactgggaagaagttccgttttgctcccaccacttcaacaagctccatctcaaggacgggaggtccattgtggttccctgccgccaccaagatgaactgattggccgggcccgcgtctctccaggggcgggatggagcatccgggagactgcttgcctagcaaaatcatatgcgcaaatgtggcagctcctttatttccacagaagggacctccgactgatggccaatgccatttgttcatctgtgccagttgactgggttccaactgggagaactacctggtcaatccatggaaagggagaatggatgaccactgaagacatgcttgtggtgtggaacagagtgtggattgaggagaacgaccacatggaagacaagaccccagttacgaaatggacagacattccctatttgggaaaaagggaagacttgtggtgtggatctctcatagggcacagaccgcgcaccacctgggctgagaacattaaaaacacagtcaacatggtgcgcaggatcataggtgatgaagaaaagtacatggactacctatccacccaagttcgctacttgggtgaagaagggtctacacctggagtgctgtaa

SEQ ID NO: 13 - DNA, 10807 bp, synthetic construct
  source 1..10807: mol_type = other DNA
agttgttgatctgtgtgaatcagactgcgacagttcgagtttgaagcgaaagctagcaacagtatcaacaggttttattttggatttggaaacgagagtttctggtcatgaaaaacccaaaaaagaaatccggaggattccggattgtcaatatgctaaaacgcggagtagcccgtgtgagcccattcgggggactgaagcgcctgcctgcaggcctgctgctgggccacggcccaatcagaatggtgctggccatcctggccttcctgaggtttacagccatcaagccctctctgggcctgatcaacagatggggcagcgtgggcaagaaggaggctatggagacaatcaagaagttcaagaaggatctggccgccatgctgcggatcatcaatgccagaaaggagaagaagcggagaggagcagacacatccgtgggaatcgtgggcctgctgctgaccacagctatggccgcagaggtgaccaggaggggctctgcctactatatgtacctggaccgcaacgatgccggcaaggccatcagcttccctaccacactgggcatgaataagtgttacatccagatcatggatctgggccacatgtgcgacgccaccatgagctatgagtgtcccatgctggatgagggcgtggagcctgacgatgtggactgctggtgtaacaccacatccacctgggtggtgtacggcacatgtcaccacaagaagggagaggcacggagatctaggcgcgcagtgaccctgccaagccactccacaaggaagctgcagacccgctctcagacatggctggagagccgggagtataccaagcacctgatccgggtggagaattggatctttagaaacccaggcttcgcactggctgccgccgccatcgcatggctgctgggcagctccacctcccagaaagtgatctacctggtcatgatcctgctgatcgcccccgcctattctatcaggtgcatcggcgtgagcaaccgcgatttcgtggagggcatgtctggaggcacctgggtggacgtggtgctggagcacggaggatgcgtgaccgtgatggcccaggataagccaacagtggacatcgagctggtgaccacaaccgtgtccaatatggccgaggtgagatcttactgctatgaggcctctatcagcgacatggcctccgattctaggtgtccaacccagggagaggcctacctggacaagcagtccgatacccagtacgtgtgcaagcggacactggtggacagaggctggggcaacggctgtggcctgtttggcaagggctctctggtgacctgcgccaagttcgcctgtagcaagaagatgaccggcaagtccatccagcccgagaatctggagtaccgcatcatgctgtccgtgcacggctcccagcactctggcatgatcgtgaatgataccggccacgagacagacgagaacagagccaaggtggagatcacccccaatagccctagggccgaggccacactgggaggatttggctccctgggcctggattgcgagccaaggaccggcctggacttcagcgatctgtactatctgacaatgaacaataagcactggctggtgcacaaggagtggtttcacgacatccccctgccttggcacgcaggagcagacacaggcaccccacactggaacaataaggaggccctggtggagttcaaggacgcccacgccaagagacagacagtggtggtgctgggcagccaggagggagcagtgcacaccgccctggcaggcgccctggaggccgagatggatggagcaaagggcaggctgtctagcggacacctgaagtgccggctgaagatggacaagctgagactgaagggcgtgagctactccctgtgcacagccgccttcaccttcaccaagatccctgccgagacactgcacggcaccgtgaccgtggagctgcagtatgccggcacagatggcccttgtaaggtgcccgcccagatggccgtggacatgcagacactgacccccgtgggcagactgatcaccgccaaccctgtgatcacagagtctaccgagaatagcaagatgatgctggagctggacccccctttcggcgactcctacatcgtgatcggcgtgggcgagaagaagatcacccaccactggcacaggtctggcagcaccatcggcaaggcctttgaggccacagtgcggggagcaaagaggatggccgtgctcggcgacaccgcatgggatttcggcagcgtgggaggggccctgaacagcctgggcaagggcattcaccagatcttcggcgccgcctttaagagcctgttcggcggcatgagctggttttcccagatcctgatcggcaccctgctgatgtggctgggcctgaacacaaagaatggctccatctctctgatgtgcctggccctgggaggcgtgctgatcttcctgtccaccgccgtgtctgccgatgtgggatgcagcgtggacttttccaagaaggagacacggtgtggcacaggcgtgttcgtgtacaacgatgtggaggcctggagggaccgctacaagtatcacccagattccccacggagactggctgccgccgtgaagcaggcctgggaggacggcatctgtggcatcagcagcgtgagccggatggagaatatcatgtggcgctctgtggagggcgagctgaatgccatcctggaggagaacggagtgcagctgaccgtggtggtgggcagcgtgaagaaccctatgtggaggggaccacagcgcctgccagtgcccgtgaatgagctgcctcacggctggaaggcctggggcaagtcttactttgtgagagccgccaagaccaacaatagcttcgtggtggacggcgatacactgaaggagtgcccactgaagcacagggcctggaactcctttctggtggaggaccacggcttcggcgtgtttcacacatccgtgtggctgaaggtgagagaggattactctctggagtgtgaccctgccgtgatcggcaccgcagtgaagggcaaggaggcagtgcactctgatctgggctattggatcgagagcgagaagaacgacacatggaggctgaagcgcgcccacctgatcgagatgaagacctgcgagtggccaaagtcccacacactgtggaccgatggcatcgaggagtctgacctgatcatccccaagtccctggccggccctctgtctcaccacaataccagagagggctacagaacacagatgaagggcccctggcacagcgaggagctggagatcaggttcgaggagtgccccggcaccaaggtgcacgtggaggagacatgtggcaccaggggcccctctctgcgcagcacaaccgccagcggcagagtgatcgaggagtggtgctgtcgcgagtgcaccatgccacccctgtcctttcgcgccaaggacggctgttggtatggcatggagatccggcctagaaaggagccagagtccaacctggtgcggtctatggtgaccgccggctccacagaccacatggatcacttctctctgggcgtgctggtcatcctgctgatggtgcaggagggcctgaagaagagaatgacaaccaagatcatcatcagcaccagcatggccgtgctggtggcaatgatcctgggaggcttttctatgagcgatctggccaagctggccatcctgatgggcgccaccttcgccgagatgaacacaggaggcgacgtggcacacctggccctgatcgccgcctttaaggtgaggcctgccctgctggtgagcttcatctttagggccaattggacaccacgcgagtccatgctgctggccctggcatcttgcctgctgcagaccgccatctccgccctggagggcgatctgatggtgctgatcaacggattcgcactggcatggctggcaatccgggctatggtggtgcccagaaccgacaatatcacactggcaatcctggccgccctgacccctctggcccggggcaccctgctggtggcatggagagcaggcctggcaacatgcggcggctttatgctgctgagcctgaagggcaagggctccgtgaagaagaacctgccattcgtgatggcactgggcctgaccgccgtgcgcctggtggaccccatcaatgtggtgggcctgctgctgctgacaaggtctggcaagcgcagctggcctccatccgaggtgctgaccgcagtgggcctgatctgtgcactggcaggaggatttgcaaaggcagacatcgagatggcaggacctatggccgcagtgggcctgctgatcgtgtcctacgtggtgtccggcaagtctgtggacatgtatatcgagagagccggcgacatcacctgggagaaggacgccgaggtgacaggcaactctcctaggctggacgtggccctggatgagtctggcgactttagcctggtggaggacgatggcccccctatgcgggagatcatcctgaaggtggtgctgatgacaatctgcggcatgaatccaatcgcaatccctttcgccgcaggagcatggtacgtgtatgtgaagaccggcaagcggagcggcgccctgtgggatgtgcctgccccaaaggaggtgaagaagggcgagacaaccgacggcgtgtacagagtgatgaccaggcgcctgctgggcagcacacaagtgggagtgggcgtgatgcaggagggcgtgttccacaccatgtggcacgtgacaaagggctccgccctgcggtctggagagggcagactggacccttactggggcgatgtgaagcaggacctggtgtcctattgtggaccctggaagctggatgcagcatgggacggacactctgaggtgcagctgctggccgtgccacccggcgagagggcaaggaacatccagaccctgcccggcatctttaagacaaaggacggcgacatcggagcagtggccctggattaccctgcaggcacctccggctctccaatcctggacaagtgcggcagagtgatcggcctgtacggcaatggcgtggtcatcaagaacggcagctacgtgagcgccatcacccagggccggagagaggaggagacaccagtggagtgtttcgagccctccatgctgaagaagaagcagctgaccgtgctggatctgcaccccggcgcaggcaagacaaggcgcgtgctgcctgagatcgtgcgcgaggccatcaagacccggctgcgtacggtgatcctggcaccaaccagagtggtggcagcagagatggaggaggccctgaggggcctgcctgtgcgctacatgacaaccgccgtgaacgtgacccacagcggcacagagatcgtggacctgatgtgccacgccaccttcaccagccggctgctgcagccaatccgcgtgcccaactacaatctgtatatcatggatgaggcccacttcacagacccaagctccatcgccgccagaggctatatcagcaccagagtggagatgggcgaggctgccgccatctttatgacagccacccctccaggcacacgcgatgcattcccagacagcaattcccctatcatggacaccgaggtggaggtgcctgagagggcatggtctagcggcttcgattgggtgaccgaccactttggcaagacagtgtggttcgtgccatctgtgcggaacggcaatgagatcgccgcctgtctgacaaaggccggcaagagagtgatccagctgagccgcaagaccttcgagacagagttccagaagaccaagcaccaggagtgggattttgtcgtgacaaccgacatctctgagatgggcgccaacttcaaggccgatagagtgatcgacagccggagatgcctgaagcctgtgatcctggatggcgagagagtgatcctggccggccccatgcctgtgacccacgcatccgccgcacagaggcggggcagaatcggcagaaaccctaataagccaggcgacgagtacctgtatggcggcggctgtgccgagacagacgaggatcacgcacactggctggaggcaaggatgctgctggataatatctacctgcaggacggcctgatcgccagcctgtataggccagaggcagataaggtggcagcaatcgagggcgagtttaagctgcggaccgagcagagaaagacattcgtggagctgatgaagaggggcgacctgcccgtgtggctggcataccaggtggcatctgccggcatcacatataccgatcggagatggtgcttcgacggcacaaccaacaatacaatcatggaggatagcgtgcccgcagaagtgtggacccggcacggcgagaagagagtgctgaagcctaggtggatggatgccagagtgtgcagcgaccacgccgccctgaagtccttcaaggagtttgcagcaggcaagagaggagcagcctttggcgtgatggaggccctgggcaccctgcccggccacatgacagagaggttccaggaggccatcgacaacctggccgtgctgatgagggcagagacaggcagccggccctacaaggctgccgccgcccagctgcccgagacactggagacaatcatgctgctgggcctgctgggcacagtgagcctgggcatcttctttgtgctgatgagaaataagggcatcggcaagatgggctttggaatggtgaccctgggagcatctgcctggctgatgtggctgagcgagatcgagcccgccagaatcgcctgcgtgctgatcgtggtgttcctgctgctggtggtgctgatcccagagcccgagaagcagaggagccctcaggataaccagatggccatcatcatcatggtggcagtgggcctgctgggcctgatcaccgccaatgagctgggctggctggagagaacaaagtctgacctgagccacctgatgggcaggcgcgaggagggagcaaccatcggctttagcatggacatcgatctgaggccagcatccgcctgggcaatctacgccgccctgacaaccttcatcacaccagcagtgcagcacgcagtgacaaccagctacaacaattattccctgatggctatggccacccaggcaggcgtgctgttcggaatgggcaagggcatgcctttttacgcctgggacttcggcgtgccactgctgatgatcggctgctatagccagctgacaccactgaccctgatcgtggccatcatcctgctggtggcccactacatgtatctgatccccggcctgcaggccgccgccgccagagccgcccagaagagaacagccgccggcatcatgaagaaccctgtggtggatggcatcgtggtgaccgacatcgatacaatgaccatcgacccacaggtggagaagaagatgggacaggtgctgctgatcgcagtggccgtgtcctctgccatcctgtccagaacagcatggggatggggagaggcaggcgccctgatcaccgccgccacatctaccctgtgggagggcagccccaataagtactggaacagctccacagccaccagcctgtgcaacatctttcgcggctcctacctggcaggagcctctctgatctatacagtgacccggaatgcaggcctggtgaagaggagaggaggaggcacaggagagacactgggagagaagtggaaggccaggctgaaccagatgtccgccctggagttctacagctataagaagtccggcatcacagaggtgtgccgcgaggaggccaggcgcgccctgaaggatggcgtggcaaccggaggacacgccgtgagccggggcagcgccaagctgaggtggctggtggagaggggctacctgcagccctacggcaaagtgatcgacctgggatgtggccgcggaggatggagctactatgtggcaaccatccggaaggtgcaggaggtgaagggctacacaaagggaggcccaggccacgaggagcccgtgctggtgcagagctatggctggaatatcgtgagacttaagagcggagtggacgtgttccacatggcagcagagccatgcgatacactgctgtgcgacatcggcgagtctagctcctctccagaggtggaggaggcaaggaccctgcgcgtgctgagcatggtgggcgactggctggagaagcgcccaggcgccttctgcatcaaggtgctgtgcccctacacatccaccatgatggagacactggagcggctgcagcggagatatggaggaggcctggtgcgggtgccactgagcagaaactccacacacgagatgtactgggtgtctggcgccaagagcaataccatcaagtctgtgagcacaaccagccagctgctgctgggaaggatggatggaccaaggcgccctgtgaagtatgaggaggacgtgaacctgggctccggcacccgcgccgtggtgtcttgcgccgaggcccccaatatgaagatcatcggcaaccggatcgagcggatcagaagcgagcacgccgagacatggttctttgacgagaaccacccctacagaacatgggcctaccacggcagctatgaggcacctacccagggctccgccagctccctgatcaatggcgtggtgaggctgctgagcaagccctgggatgtggtgacaggcgtgaccggcatcgccatgaccgacacaaccccttatggccagcagagggtgtttaaggagaaggtggatacccgcgtgcctgacccacaggagggcacacggcaggtcatgagcatggtgtctagctggctgtggaaggagctgggcaagcacaagcggcccagagtgtgcacaaaggaggagtttatcaataaggtgcgctccaacgccgccctgggagcaatcttcgaggaggagaaggagtggaagaccgccgtggaggccgtgaacgatccacggttctgggccctggtggacaaggagagggagcaccacctgaggggagagtgccagtcctgcgtgtacaatatgatgggcaagagggagaagaagcagggcgagtttggcaaggccaagggctctcgcgccatctggtatatgtggctgggcgcccggttcctggagtttgaggccctgggcttcctgaacgaggaccactggatgggaagagagaacagcggaggaggagtggagggcctgggcctgcagaggctgggctacgtgctggaggagatgagcagaatccccggcggccggatgtatgccgacgataccgccggctgggatacacggatctccagatttgacctggagaatgaggccctgatcaccaaccagatggagaagggacacagagccctggccctggccatcatcaagtacacatatcagaacaaggtggtgaaggtgctgaggcctgccgagaagggcaagaccgtgatggacatcatcagcaggcaggaccagaggggctccggacaggtggtgacctacgccctgaatacattcaccaacctggtggtgcagctgatccggaatatggaggccgaggaggtgctggagatgcaggatctgtggctgctgcggagatctgagaaggtgaccaattggctgcagagcaacggctgggacaggctgaagaggatggccgtgagcggcgacgattgcgtggtgaagcccatcgacgataggtttgcccacgccctgcgcttcctgaacgatatgggcaaggtgcgcaaggacacccaggagtggaagccttctacaggctgggataactgggaggaggtgccattttgcagccaccacttcaataagctgcacctgaaggatggccggtccatcgtggtgccttgtagacaccaggacgagctgatcggaagggcccgcgtgagcccaggcgcaggctggtccatccgggagacagcctgcctggccaagtcctacgcccagatgtggcagctgctgtatttccacaggcgcgatctgagactgatggccaatgccatctgttcctctgtgcctgtggactgggtgccaaccggcaggacaacctggagcatccacggcaagggcgagtggatgacaaccgaggacatgctggtggtgtggaatcgcgtgtggatcgaggagaacgatcacatggaggacaagacaccagtgaccaagtggacagacatcccctacctgggcaagagggaggacctgtggtgcggcagcctgatcggacacaggccaagaacaacctgggcagagaacatcaagaataccgtgaacatggtgcggagaatcatcggcgatgaggagaagtatatggactatctgtccactcaggtccgctatctgggcgaagaaggctcaactcccggcgtgctgtaagcaccaatcttaatgttgtcaggcctgctagtcagccacagcttggggaaagctgtgcagcctgtgacccccccaggagaagctgggaaaccaagcctatagtcaggccgagaacgccatggcacggaagaagccatgctgcctgtgagcccctcagaggacactgagtcaaaaaaccccacgcgcttggaggcgcaggatgggaaaagaaggtggcgaccttccccacccttcaatctggggcctgaactggagatcagctgtggatctccagaagagggactagtggttagaggagaccccccggaaaacgcaaaacagcatattgacgctgggaaagaccagagactccatgagtttccaccacgctggccgccaggcacagatcgccgaatagcggcggccggtgtggggaaatccatgggtct

SEQ ID NO: 14 - DNA, 10272 bp, synthetic construct
  source 1..10272: mol_type = other DNA
atgaaaaacccaaaaaagaaatccggaggattccggattgtcaatatgctaaaacgcggagtagcccgtgtgagcccattcgggggactgaagcgcctgcctgcaggcctgctgctgggccacggcccaatcagaatggtgctggccatcctggccttcctgaggtttacagccatcaagccctctctgggcctgatcaacagatggggcagcgtgggcaagaaggaggctatggagacaatcaagaagttcaagaaggatctggccgccatgctgcggatcatcaatgccagaaaggagaagaagcggagaggagcagacacatccgtgggaatcgtgggcctgctgctgaccacagctatggccgcagaggtgaccaggaggggctctgcctactatatgtacctggaccgcaacgatgccggcaaggccatcagcttccctaccacactgggcatgaataagtgttacatccagatcatggatctgggccacatgtgcgacgccaccatgagctatgagtgtcccatgctggatgagggcgtggagcctgacgatgtggactgctggtgtaacaccacatccacctgggtggtgtacggcacatgtcaccacaagaagggagaggcacggagatctaggcgcgcagtgaccctgccaagccactccacaaggaagctgcagacccgctctcagacatggctggagagccgggagtataccaagcacctgatccgggtggagaattggatctttagaaacccaggcttcgcactggctgccgccgccatcgcatggctgctgggcagctccacctcccagaaagtgatctacctggtcatgatcctgctgatcgcccccgcctattctatcaggtgcatcggcgtgagcaaccgcgatttcgtggagggcatgtctggaggcacctgggtggacgtggtgctggagcacggaggatgcgtgaccgtgatggcccaggataagccaacagtggacatcgagctggtgaccacaaccgtgtccaatatggccgaggtgagatcttactgctatgaggcctctatcagcgacatggcctccgattctaggtgtccaacccagggagaggcctacctggacaagcagtccgatacccagtacgtgtgcaagcggacactggtggacagaggctggggcaacggctgtggcctgtttggcaagggctctctggtgacctgcgccaagttcgcctgtagcaagaagatgaccggcaagtccatccagcccgagaatctggagtaccgcatcatgctgtccgtgcacggctcccagcactctggcatgatcgtgaatgataccggccacgagacagacgagaacagagccaaggtggagatcacccccaatagccctagggccgaggccacactgggaggatttggctccctgggcctggattgcgagccaaggaccggcctggacttcagcgatctgtactatctgacaatgaacaataagcactggctggtgcacaaggagtggtttcacgacatccccctgccttggcacgcaggagcagacacaggcaccccacactggaacaataaggaggccctggtggagttcaaggacgcccacgccaagagacagacagtggtggtgctgggcagccaggagggagcagtgcacaccgccctggcaggcgccctggaggccgagatggatggagcaaagggcaggctgtctagcggacacctgaagtgccggctgaagatggacaagctgagactgaagggcgtgagctactccctgtgcacagccgccttcaccttcaccaagatccctgccgagacactgcacggcaccgtgaccgtggagctgcagtatgccggcacagatggcccttgtaaggtgcccgcccagatggccgtggacatgcagacactgacccccgtgggcagactgatcaccgccaaccctgtgatcacagagtctaccgagaatagcaagatgatgctggagctggacccccctttcggcgactcctacatcgtgatcggcgtgggcgagaagaagatcacccaccactggcacaggtctggcagcaccatcggcaaggcctttgaggccacagtgcggggagcaaagaggatggccgtgctcggcgacaccgcatgggatttcggcagcgtgggaggggccctgaacagcctgggcaagggcattcaccagatcttcggcgccgcctttaagagcctgttcggcggcatgagctggttttcccagatcctgatcggcaccctgctgatgtggctgggcctgaacacaaagaatggctccatctctctgatgtgcctggccctgggaggcgtgctgatcttcctgtccaccgccgtgtctgccgatgtgggatgcagcgtggacttttccaagaaggagacacggtgtggcacaggcgtgttcgtgtacaacgatgtggaggcctggagggaccgctacaagtatcacccagattccccacggagactggctgccgccgtgaagcaggcctgggaggacggcatctgtggcatcagcagcgtgagccggatggagaatatcatgtggcgctctgtggagggcgagctgaatgccatcctggaggagaacggagtgcagctgaccgtggtggtgggcagcgtgaagaaccctatgtggaggggaccacagcgcctgccagtgcccgtgaatgagctgcctcacggctggaaggcctggggcaagtcttactttgtgagagccgccaagaccaacaatagcttcgtggtggacggcgatacactgaaggagtgcccactgaagcacagggcctggaactcctttctggtggaggaccacggcttcggcgtgtttcacacatccgtgtggctgaaggtgagagaggattactctctggagtgtgaccctgccgtgatcggcaccgcagtgaagggcaaggaggcagtgcactctgatctgggctattggatcgagagcgagaagaacgacacatggaggctgaagcgcgcccacctgatcgagatgaagacctgcgagtggccaaagtcccacacactgtggaccgatggcatcgaggagtctgacctgatcatccccaagtccctggccggccctctgtctcaccacaataccagagagggctacagaacacagatgaagggcccctggcacagcgaggagctggagatcaggttcgaggagtgccccggcaccaaggtgcacgtggaggagacatgtggcaccaggggcccctctctgcgcagcacaaccgccagcggcagagtgatcgaggagtggtgctgtcgcgagtgcaccatgccacccctgtcctttcgcgccaaggacggctgttggtatggcatggagatccggcctagaaaggagccagagtccaacctggtgcggtctatggtgaccgccggctccacagaccacatggatcacttctctctgggcgtgctggtcatcctgctgatggtgcaggagggcctgaagaagagaatgacaaccaagatcatcatcagcaccagcatggccgtgctggtggcaatgatcctgggaggcttttctatgagcgatctggccaagctggccatcctgatgggcgccaccttcgccgagatgaacacaggaggcgacgtggcacacctggccctgatcgccgcctttaaggtgaggcctgccctgctggtgagcttcatctttagggccaattggacaccacgcgagtccatgctgctggccctggcatcttgcctgctgcagaccgccatctccgccctggagggcgatctgatggtgctgatcaacggattcgcactggcatggctggcaatccgggctatggtggtgcccagaaccgacaatatcacactggcaatcctggccgccctgacccctctggcccggggcaccctgctggtggcatggagagcaggcctggcaacatgcggcggctttatgctgctgagcctgaagggcaagggctccgtgaagaagaacctgccattcgtgatggcactgggcctgaccgccgtgcgcctggtggaccccatcaatgtggtgggcctgctgctgctgacaaggtctggcaagcgcagctggcctccatccgaggtgctgaccgcagtgggcctgatctgtgcactggcaggaggatttgcaaaggcagacatcgagatggcaggacctatggccgcagtgggcctgctgatcgtgtcctacgtggtgtccggcaagtctgtggacatgtatatcgagagagccggcgacatcacctgggagaaggacgccgaggtgacaggcaactctcctaggctggacgtggccctggatgagtctggcgactttagcctggtggaggacgatggcccccctatgcgggagatcatcctgaaggtggtgctgatgacaatctgcggcatgaatccaatcgcaatccctttcgccgcaggagcatggtacgtgtatgtgaagaccggcaagcggagcggcgccctgtgggatgtgcctgccccaaaggaggtgaagaagggcgagacaaccgacggcgtgtacagagtgatgaccaggcgcctgctgggcagcacacaagtgggagtgggcgtgatgcaggagggcgtgttccacaccatgtggcacgtgacaaagggctccgccctgcggtctggagagggcagactggacccttactggggcgatgtgaagcaggacctggtgtcctattgtggaccctggaagctggatgcagcatgggacggacactctgaggtgcagctgctggccgtgccacccggcgagagggcaaggaacatccagaccctgcccggcatctttaagacaaaggacggcgacatcggagcagtggccctggattaccctgcaggcacctccggctctccaatcctggacaagtgcggcagagtgatcggcctgtacggcaatggcgtggtcatcaagaacggcagctacgtgagcgccatcacccagggccggagagaggaggagacaccagtggagtgtttcgagccctccatgctgaagaagaagcagctgaccgtgctggatctgcaccccggcgcaggcaagacaaggcgcgtgctgcctgagatcgtgcgcgaggccatcaagacccggctgcgtacggtgatcctggcaccaaccagagtggtggcagcagagatggaggaggccctgaggggcctgcctgtgcgctacatgacaaccgccgtgaacgtgacccacagcggcacagagatcgtggacctgatgtgccacgccaccttcaccagccggctgctgcagccaatccgcgtgcccaactacaatctgtatatcatggatgaggcccacttcacagacccaagctccatcgccgccagaggctatatcagcaccagagtggagatgggcgaggctgccgccatctttatgacagccacccctccaggcacacgcgatgcattcccagacagcaattcccctatcatggacaccgaggtggaggtgcctgagagggcatggtctagcggcttcgattgggtgaccgaccactttggcaagacagtgtggttcgtgccatctgtgcggaacggcaatgagatcgccgcctgtctgacaaaggccggcaagagagtgatccagctgagccgcaagaccttcgagacagagttccagaagaccaagcaccaggagtgggattttgtcgtgacaaccgacatctctgagatgggcgccaacttcaaggccgatagagtgatcgacagccggagatgcctgaagcctgtgatcctggatggcgagagagtgatcctggccggccccatgcctgtgacccacgcatccgccgcacagaggcggggcagaatcggcagaaaccctaataagccaggcgacgagtacctgtatggcggcggctgtgccgagacagacgaggatcacgcacactggctggaggcaaggatgctgctggataatatctacctgcaggacggcctgatcgccagcctgtataggccagaggcagataaggtggcagcaatcgagggcgagtttaagctgcggaccgagcagagaaagacattcgtggagctgatgaagaggggcgacctgcccgtgtggctggcataccaggtggcatctgccggcatcacatataccgatcggagatggtgcttcgacggcacaaccaacaatacaatcatggaggatagcgtgcccgcagaagtgtggacccggcacggcgagaagagagtgctgaagcctaggtggatggatgccagagtgtgcagcgaccacgccgccctgaagtccttcaaggagtttgcagcaggcaagagaggagcagcctttggcgtgatggaggccctgggcaccctgcccggccacatgacagagaggttccaggaggccatcgacaacctggccgtgctgatgagggcagagacaggcagccggccctacaaggctgccgccgcccagctgcccgagacactggagacaatcatgctgctgggcctgctgggcacagtgagcctgggcatcttctttgtgctgatgagaaataagggcatcggcaagatgggctttggaatggtgaccctgggagcatctgcctggctgatgtggctgagcgagatcgagcccgccagaatcgcctgcgtgctgatcgtggtgttcctgctgctggtggtgctgatcccagagcccgagaagcagaggagccctcaggataaccagatggccatcatcatcatggtggcagtgggcctgctgggcctgatcaccgccaatgagctgggctggctggagagaacaaagtctgacctgagccacctgatgggcaggcgcgaggagggagcaaccatcggctttagcatggacatcgatctgaggccagcatccgcctgggcaatctacgccgccctgacaaccttcatcacaccagcagtgcagcacgcagtgacaaccagctacaacaattattccctgatggctatggccacccaggcaggcgtgctgttcggaatgggcaagggcatgcctttttacgcctgggacttcggcgtgccactgctgatgatcggctgctatagccagctgacaccactgaccctgatcgtggccatcatcctgctggtggcccactacatgtatctgatccccggcctgcaggccgccgccgccagagccgcccagaagagaacagccgccggcatcatgaagaaccctgtggtggatggcatcgtggtgaccgacatcgatacaatgaccatcgacccacaggtggagaagaagatgggacaggtgctgctgatcgcagtggccgtgtcctctgccatcctgtccagaacagcatggggatggggagaggcaggcgccctgatcaccgccgccacatctaccctgtgggagggcagccccaataagtactggaacagctccacagccaccagcctgtgcaacatctttcgcggctcctacctggcaggagcctctctgatctatacagtgacccggaatgcaggcctggtgaagaggagaggaggaggcacaggagagacactgggagagaagtggaaggccaggctgaaccagatgtccgccctggagttctacagctataagaagtccggcatcacagaggtgtgccgcgaggaggccaggcgcgccctgaaggatggcgtggcaaccggaggacacgccgtgagccggggcagcgccaagctgaggtggctggtggagaggggctacctgcagccctacggcaaagtgatcgacctgggatgtggccgcggaggatggagctactatgtggcaaccatccggaaggtgcaggaggtgaagggctacacaaagggaggcccaggccacgaggagcccgtgctggtgcagagctatggctggaatatcgtgagacttaagagcggagtggacgtgttccacatggcagcagagccatgcgatacactgctgtgcgacatcggcgagtctagctcctctccagaggtggaggaggcaaggaccctgcgcgtgctgagcatggtgggcgactggctggagaagcgcccaggcgccttctgcatcaaggtgctgtgcccctacacatccaccatgatggagacactggagcggctgcagcggagatatggaggaggcctggtgcgggtgccactgagcagaaactccacacacgagatgtactgggtgtctggcgccaagagcaataccatcaagtctgtgagcacaaccagccagctgctgctgggaaggatggatggaccaaggcgccctgtgaagtatgaggaggacgtgaacctgggctccggcacccgcgccgtggtgtcttgcgccgaggcccccaatatgaagatcatcggcaaccggatcgagcggatcagaagcgagcacgccgagacatggttctttgacgagaaccacccctacagaacatgggcctaccacggcagctatgaggcacctacccagggctccgccagctccctgatcaatggcgtggtgaggctgctgagcaagccctgggatgtggtgacaggcgtgaccggcatcgccatgaccgacacaaccccttatggccagcagagggtgtttaaggagaaggtggatacccgcgtgcctgacccacaggagggcacacggcaggtcatgagcatggtgtctagctggctgtggaaggagctgggcaagcacaagcggcccagagtgtgcacaaaggaggagtttatcaataaggtgcgctccaacgccgccctgggagcaatcttcgaggaggagaaggagtggaagaccgccgtggaggccgtgaacgatccacggttctgggccctggtggacaaggagagggagcaccacctgaggggagagtgccagtcctgcgtgtacaatatgatgggcaagagggagaagaagcagggcgagtttggcaaggccaagggctctcgcgccatctggtatatgtggctgggcgcccggttcctggagtttgaggccctgggcttcctgaacgaggaccactggatgggaagagagaacagcggaggaggagtggagggcctgggcctgcagaggctgggctacgtgctggaggagatgagcagaatccccggcggccggatgtatgccgacgataccgccggctgggatacacggatctccagatttgacctggagaatgaggccctgatcaccaaccagatggagaagggacacagagccctggccctggccatcatcaagtacacatatcagaacaaggtggtgaaggtgctgaggcctgccgagaagggcaagaccgtgatggacatcatcagcaggcaggaccagaggggctccggacaggtggtgacctacgccctgaatacattcaccaacctggtggtgcagctgatccggaatatggaggccgaggaggtgctggagatgcaggatctgtggctgctgcggagatctgagaaggtgaccaattggctgcagagcaacggctgggacaggctgaagaggatggccgtgagcggcgacgattgcgtggtgaagcccatcgacgataggtttgcccacgccctgcgcttcctgaacgatatgggcaaggtgcgcaaggacacccaggagtggaagccttctacaggctgggataactgggaggaggtgccattttgcagccaccacttcaataagctgcacctgaaggatggccggtccatcgtggtgccttgtagacaccaggacgagctgatcggaagggcccgcgtgagcccaggcgcaggctggtccatccgggagacagcctgcctggccaagtcctacgcccagatgtggcagctgctgtatttccacaggcgcgatctgagactgatggccaatgccatctgttcctctgtgcctgtggactgggtgccaaccggcaggacaacctggagcatccacggcaagggcgagtggatgacaaccgaggacatgctggtggtgtggaatcgcgtgtggatcgaggagaacgatcacatggaggacaagacaccagtgaccaagtggacagacatcccctacctgggcaagagggaggacctgtggtgcggcagcctgatcggacacaggccaagaacaacctgggcagagaacatcaagaataccgtgaacatggtgcggagaatcatcggcgatgaggagaagtatatggactatctgtccactcaggtccgctatctgggcgaagaaggctcaactcccggcgtgctgtaa

SEQ ID NO: 15 - DNA, 10735 bp, synthetic construct
  source 1..10735: mol_type = other DNA
agttgttagtctacgtggaccgacaagaacagtttcgaatcggaagcttgcttaacgtagttctaacagttttttattagagagcagatctctgatgaacaaccaacggaaaaagacgggtcgaccgtctttcaatatgctgaaacgcgcgagaaaccgcgtgtcaactgtttcacagttggcgaagagattctcaaaaggattgctttcaggccaaggacccatgaaattggtgatggcttttatagcattcctaagatttctagccatacctccaacagcaggaattttggctagatggggctcattcaagaagaatggagcgatcaaagtgttacggggtttcaagaaagaaatctcaaacatgttgaacataatgaacaggaggaaaagatctgtgaccatgctcctcatgctgctgcccacagccctggcgttccatctgaccacccgagggggagagccgcacatgatagttagcaagcaggaaagaggaaaatcacttttgtttaagacctctgcaggtgtcaacatgtgcacccttattgcaatggatttgggagagttatgtgaggacacaatgacctacaaatgcccccggatcactgagacggaaccagatgacgttgactgttggtgcaatgccacggagacatgggtgacctatggaacatgttctcaaactggtgaacaccgacgagacaaacgttccgtcgcactggcaccacacgtagggcttggtctagaaacaagaaccgaaacgtggatgtcctctgaaggcgcttggaaacaaatacaaaaagtggagacctgggctctgagacacccaggattcacggtgatagccctttttctagcacatgccataggaacatccatcacccagaaagggatcatttttattttgctgatgctggtaactccatccatggccatgcggtgcgtgggaataggcaacagagacttcgtggaaggactgtcaggagctacgtgggtggatgtggtactggagcatggaagttgcgtcactaccatggcaaaagacaaaccaacactggacattgaactcttgaagacggaggtcacaaaccctgccgtcctgcgcaaactgtgcattgaagctaaaatatcaaacaccaccaccgattcgagatgtccaacacaaggagaagccacgctggtggaagaacaggacacgaactttgtgtgtcgacgaacgttcgtggacagaggctggggcaatggttgtgggctattcggaaaaggtagcttaataacgtgtgctaagtttaagtgtgtgacaaaactggaaggaaagatagtccaatatgaaaacttaaaatattcagtgatagtcaccgtacacactggagaccagcaccaagttggaaatgagaccacagaacatggaacaactgcaaccataacacctcaagctcccacgtcggaaatacagctgacagactacggagctctaacattggattgttcacctagaacagggctagactttaatgagatggtgttgttgacaatggaaaaaaaatcatggctcgtccacaaacaatggtttctagacttaccactgccttggacctcgggggcttcaacatcccaagagacttggaatagacaagacttgctggtcacatttaagacagctcatgcaaaaaagcaggaagtagtcgtactaggatcacaagaaggagcaatgcacactgcgttgactggagcgacagaaatccaaacgtctggaacgacaacaatttttgcaggacacctgaaatgcagactaaaaatggataaactgactttaaaagggatgtcatatgtaatgtgcacagggtcattcaagttagagaaggaagtggctgagacccagcatggaactgttctagtgcaggttaaatacgaaggaacagatgcaccatgcaagatccccttctcgtcccaagatgagaagggagtaacccagaatgggagattgataacagccaaccccatagtcactgacaaagaaaaaccagtcaacattgaagcggagccaccttttggtgagagctacattgtggtaggagcaggtgaaaaagctttgaaactaagctggttcaagaagggaagcagtatagggaaaatgtttgaagcaactgcccgtggagcacgaaggatggccatcctgggagacactgcatgggacttcggttctataggaggggtgttcacgtctgtgggaaaactgatacaccagatttttgggactgcgtatggagttttgttcagcggtgtttcttggaccatgaagataggaatagggattctgctgacatggctaggattaaactcaaggagcacgtccctttcaatgacgtgtatcgcagttggcatggtcacgctgtacctaggagtcatggttcaggcggactcgggatgtgtaatcaactggaaaggcagagaactcaaatgtggaagcggcatttttgtcaccaatgaagtccacacctggacagagcaatataaattccaggccgactcccctaagagactatcagcggccattgggaaggcatgggaggagggtgtgtgtggaattcgatcagccactcgtctcgagaacatcatgtggaagcaaatatcaaatgaattaaaccacatcttacttgaaaatgacatgaaatttacagtggtcgtaggagacgttagtggaatcttggcccaaggaaagaaaatgattaggccacaacccatggaacacaaatactcgtggaaaagctggggaaaagccaaaatcataggagcagatgtacagaataccaccttcatcatcgacggcccaaacaccccagaatgccctgataaccaaagagcatggaacatttgggaagttgaagactatggatttggaattttcacgacaaacatatggttgaaattgcgtgactcctacactcaagtgtgtgaccaccggctaatgtcagctgccatcaaggatagcaaagcagtccatgctgacatggggtactggatagaaagtgaaaagaacgagacttggaagttggcaagagcctccttcatagaagttaagacatgcatctggccaaaatcccacactctatggagcaatggagtcctggaaagtgagatgataatcccaaagatatatggaggaccaatatctcagcacaactacagaccaggatatttcacacaaacagcagggccgtggcacttgggcaagttagaactagattttgatttatgtgaaggtaccactgttgttgtggatgaacattgtggaaatcgaggaccatctcttagaaccacaacagtcacaggaaagacaatccatgaatggtgctgtagatcttgcacgttaccccccctacgtttcaaaggagaagacgggtgctggtacggcatggaaatcagaccagtcaaggagaaggaagagaacctagttaagtcaatggtctctgcagggtcaggagaagtggacagtttttcactaggactgctatgcatatcaataatgatcgaagaggtaatgagatccagatggagcagaaaaatgctgatgactggaacattggctgtgttcctccttctcacaatgggacaattgacatggaatgatctgatcaggctatgtatcatggttggagccaacgcttcagacaagatggggatgggaacaacgtacctagctttgatggccactttcagaatgagaccaatgttcgcagtcgggctactgtttcgcagattaacatctagagaagttcttcttcttacagttggattgagtctggtggcatctgtagaactaccaaattccttagaggagctaggggatggacttgcaatgggcatcatgatgttgaaattactgactgattttcagtcacatcagctatgggctaccttgctgtctttaacatttgtcaaaacaactttttcattgcactatgcatggaagacaatggctatgatactgtcaattgtatctctcttccctttatgcctgtccacgacttctcaaaaaacaacatggcttccggtgttgctgggatctcttggatgcaaaccactaaccatgtttcttataacagaaaacaaaatctggggaaggaaaagctggcctctcaatgaaggaattatggctgttggaatagttagcattcttctaagttcacttctcaagaatgatgtgccactagctggcccactaatagctggaggcatgctaatagcatgttatgtcatatctggaagctcggccgatttatcactggagaaagcggctgaggtctcctgggaagaagaagcagaacactctggtgcctcacacaacatactagtggaggtccaagatgatggaaccatgaagataaaggatgaagagagagatgacacactcaccattctcctcaaagcaactctgctagcaatctcaggggtatacccaatgtcaataccggcgaccctctttgtgtggtatttttggcagaaaaagaaacagagatcaggagtgctatgggacacacccagccctccagaagtggaaagagcagtccttgatgatggcatttatagaattctccaaagaggattgttgggcaggtctcaagtaggagtaggagtttttcaagaaggcgtgttccacacaatgtggcacgtcaccaggggagctgtcctcatgtaccaagggaagagactggaaccaagttgggccagtgtcaaaaaagacttgatctcatatggaggaggttggaggtttcaaggatcctggaacgcgggagaagaagtgcaggtgattgctgttgaaccggggaagaaccccaaaaatgtacagacagcgccgggtaccttcaagacccctgaaggcgaagttggagccatagctctagactttaaacccggcacatctggatctcctatcgtgaacagagagggaaaaatagtaggtctttatggaaatggagtggtgacaacaagtggtacctacgtcagcgccatagctcaagctaaagcatcacaagaagggcctctaccagagattgaggacgaggtgtttaggaaaagaaacttaacaataatggacctacatccaggatcggggaaaacaagaagatatcttccagccatagtccgtgaggccataagaaggaacgtgcgcacgctagtcttagctcccacaagagttgtcgcttctgaaatggcagaggcgctcaagggaatgccaataaggtatcagacaacagcagtgaagagtgaacacacaggaaaagagatagttgaccttatgtgtcacgccactttcactatgcgtctcctgtctcctgtgagagttcccaattataatatgattatcatggatgaagcacattttaccgatccagccagcatagcagccagagggtatatctcaacccgagtgggtatgggtgaagcagctgcgattttcatgacagccactccccccggatcggtggaggcctttccacagagcaatgcagttatccaagatgaggaaagagacattcctgaaagatcatggaactcaggctatgactggatcactgatttcccaggtaaaacagtctggtttgttccaagcatcaaatcaggaaatgacattgccaactgtttaagaaagaatgggaaacgggtggtccaattgagcagaaaaacttttgacactgagtaccagaaaacaaaaaataacgactgggactatgttgtcacaacagacatatccgaaatgggagcaaacttccgagccgacagggtaatagacccgaggcggtgcctgaaaccggtaatactaaaagatggcccagagcgtgtcattctagccggaccgatgccagtgactgtggctagcgccgcccagaggagaggaagaattggaaggaaccaaaataaggaaggcgatcagtatatttacatgggacagcctctaaacaatgatgaggaccacgcccattggacagaagcaaaaatgctccttgacaacataaacacaccagaagggattatcccagccctctttgagccggagagagaaaagagtgcagcaatagacggggaatacagactacggggtgaagcgaggaaaacgttcgtggagctcatgagaagaggagatctacctgtctggctatcctacaaagttgcctcagaaggcttccagtactccgacagaaggtggtgctttgatggggaaaggaacaaccaggtgttggaggagaacatggacgtggagatctggacaaaagaaggagaaagaaagaaactacgaccccgctggctggatgccagaacatactctgacccactggctctgcgcgaattcaaagagttcgcagcaggaagaagaagcgtctcaggtgacctaatattagaaatagggaaacttccacaacatttaacgcaaagggcccagaacgccttggacaatctggttatgttgcacaactctgaacaaggaggaaaagcctatagacacgccatggaagaactaccagacaccatagaaacgttaatgctcctagctttgatagctgtgctgactggtggagtgacgttgttcttcctatcaggaaggggtctaggaaaaacatccattggcctactctgcgtgattgcctcaagcgcactgctatggatggccagtgtggaaccccattggatagcggcctctatcatactggagttctttctgatggtgttgcttattccagagccggacagacagcgcactccacaagacaaccagctagcatacgtggtgataggtctgttattcatgatattgacagcggcagccaatgagatgggattactggaaaccacaaagaaggacctggggattggtcatgcagctgctgaaaaccaccatcatgctgcaatgctggacgtagacctacatccagcttcagcctggactctctatgcagtggccacaacaattatcactcccatgatgagacacacaattgaaaacacaacggcaaatatttccctgacagctattgcaaaccaggcagctatattgatgggacttgacaagggatggccaatatcaaagatggacataggagttccacttctcgccttggggtgctattctcaggtgaacccgctgacgctgacagcggcggtatttatgctagtggctcattatgccataattggacccggactgcaagcaaaagctactagagaagctcaaaaaaggacagcagccggaataatgaaaaacccaactgtcgacgggatcgttgcaatagatttggaccctgtggtttacgatgcaaaatttgaaaaacagctaggccaaataatgttgttgatactttgcacatcacagatcctcctgatgcggaccacatgggccttgtgtgaatccatcacactagccactggacctctgactacgctttgggagggatctccaggaaaattctggaacaccacgatagcggtgtccatggcaaacatttttaggggaagttatctagcaggagcaggtctggccttttcattaatgaaatctctaggaggaggtaggagaggcacgggagcccaaggggaaacactgggagaaaaatggaaaagacagctaaaccaattgagcaagtcagaattcaacacttacaaaaggagtgggattatagaggtggatagatctgaagccaaagaggggttaaaaagaggagaaccgactaaacacgcagtgtcgagaggaacggccaaactgaggtggtttgtggagaggaaccttgtgaaaccagaagggaaagtcatagacctcggttgtggaagaggtggctggtcatattattgcgctgggctgaagaaagtcacagaagtgaaaggatacacgaaaggaggacctggacatgaggaaccaatcccaatggcaacctatggatggaacctagtaaagctatactccgggaaagatgtattctttacaccacctgagaaatgtgacaccctcttgtgtgatattggtgagtcctctccgaacccaactatagaagaaggaagaacgttacgtgttctaaagatggtggaaccatggctcagaggaaaccaattttgcataaaaattctaaatccctatatgccgagtgtggtagaaactttggagcaaatgcaaagaaaacatggaggaatgctagtgcgaaatccactctcaagaaactccactcatgaaatgtactgggtttcatgtggaacaggaaacattgtgtcagcagtaaacatgacatctagaatgttgctaaatcgattcacaatggctcacaggaagccaacatatgaaagagacgtggacttaggcgctggaacaagacatgtggcagtagaaccagaggtggccaacctagatatcattggccagaggatagagaatataaaaaatggacacaaatcaacatggcactatgatgaggacaatccatacaaaacatgggcctatcatggatcatatgaggtcaagccatcaggatcagcctcatccatggtcaatggtgtggtgagactgctaaccaaaccatgggatgtcattcccatggtcacacaaatagccatgactgacaccacaccctttggacaacagagggtgtttaaagagaaagttgacacgcgtacaccaaaagcgaaacgaggcacagcacaaattatggaggtgacagccaggtggttatggggttttctctctagaaacaaaaaacccagaatctgcacaagagaggagttcacaagaaaagtcaggtcaaacgcagctattggagcagtgttcgttgatgaaaatcaatggaactcagcaaaagaggcagtggaagatgaacggttctgggaccttgtgcacagagagagggagcttcataaacaaggaaaatgtgccacgtgtgtctacaacatgatgggaaagagagagaaaaaattaggagagttcggaaaggcaaaaggaagtcgcgcaatatggtacatgtggttgggagcgcgctttttagagtttgaagcccttggtttcatgaatgaagatcactggttcagcagagagaattcactcagtggagtggaaggagaaggactccacaaacttggatacatactcagagacatatcaaagattccagggggaaatatgtatgcagatgacacagccggatgggacacaagaataacagaggatgatcttcagaatgaggccaaaatcactgacatcatggaacctgaacatgccctattggccacgtcaatctttaagctaacctaccaaaacaaggtagtaagggtgcagagaccagcgaaaaatggaaccgtgatggatgtcatatccagacgtgaccagagaggaagtggacaggttggaacctatggcttaaacaccttcaccaacatggaggcccaactaataagacaaatggagtctgagggaatcttttcacccagcgaattggaaaccccaaatctagccgaaagagtcctcgactggttgaaaaaacatggcaccgagaggctgaaaagaatggcaatcagtggagatgactgtgtggtgaaaccaatcgatgacagatttgcaacagccttaacagctttgaatgacatgggaaaggtaagaaaagacataccgcaatgggaaccttcaaaaggatggaatgattggcaacaagtgcctttctgttcacaccatttccaccagctgattatgaaggatgggagggagatagtggtgccatgccgcaaccaagatgaacttgtaggtagggccagagtatcacaaggcgccggatggagcttgagagaaactgcatgcctaggcaagtcatatgcacaaatgtggcagctgatgtacttccacaggagagacttgagattagcggctaatgctatctgttcagccgttccagttgattgggtcccaaccagccgtaccacctggtcgatccatgcccaccatcaatggatgacaacagaagacatgttgtcagtgtggaatagggtttggatagaggaaaacccatggatggaggacaagactcatgtgtccagttgggaagacgttccatacctaggaaaaagggaagatcgatggtgtggatccctaataggcttaacagcacgagccacctgggccaccaacatacaagtggccataaaccaagtgagaaggctcattgggaatgagaattatctagacttcatgacatcaatgaagagattcaaaaacgagagtgatcccgaaggggcactctggtaagccaactcattcacaaaataaaggaaaataaaaaatcaaacaaggcaagaagtcaggccggattaagccatagcacggtaagagctatgctgcctgtgagccccgtccaaggacgtaaaatgaagtcaggccgaaagccacggttcgagcaagccgtgctgcctgtagctccatcgtggggatgtaaaaacccgggaggctgcaaaccatggaagctgtacgcatggggtagcagactagtggttagaggagacccctcccaagacacaacgcagcagcggggcccaacaccaggggaagctgtaccctggtggtaaggactagaggttagaggagaccccccgcacaacaacaaacagcatattgacgctgggagagaccagagatcctgctgtctctacagcatcattccaggcacagaacgccaaaaaatggaatggtgctgttgaatcaacaggttct

SEQ ID NO: 16 - DNA, 10179 bp, synthetic construct
  source 1..10179: mol_type = other DNA
atgaacaaccaacggaaaaagacgggtcgaccgtctttcaatatgctgaaacgcgcgagaaaccgcgtgtcaactgtttcacagttggcgaagagattctcaaaaggattgctttcaggccaaggacccatgaaattggtgatggcttttatagcattcctaagatttctagccatacctccaacagcaggaattttggctagatggggctcattcaagaagaatggagcgatcaaagtgttacggggtttcaagaaagaaatctcaaacatgttgaacataatgaacaggaggaaaagatctgtgaccatgctcctcatgctgctgcccacagccctggcgttccatctgaccacccgagggggagagccgcacatgatagttagcaagcaggaaagaggaaaatcacttttgtttaagacctctgcaggtgtcaacatgtgcacccttattgcaatggatttgggagagttatgtgaggacacaatgacctacaaatgcccccggatcactgagacggaaccagatgacgttgactgttggtgcaatgccacggagacatgggtgacctatggaacatgttctcaaactggtgaacaccgacgagacaaacgttccgtcgcactggcaccacacgtagggcttggtctagaaacaagaaccgaaacgtggatgtcctctgaaggcgcttggaaacaaatacaaaaagtggagacctgggctctgagacacccaggattcacggtgatagccctttttctagcacatgccataggaacatccatcacccagaaagggatcatttttattttgctgatgctggtaactccatccatggccatgcggtgcgtgggaataggcaacagagacttcgtggaaggactgtcaggagctacgtgggtggatgtggtactggagcatggaagttgcgtcactaccatggcaaaagacaaaccaacactggacattgaactcttgaagacggaggtcacaaaccctgccgtcctgcgcaaactgtgcattgaagctaaaatatcaaacaccaccaccgattcgagatgtccaacacaaggagaagccacgctggtggaagaacaggacacgaactttgtgtgtcgacgaacgttcgtggacagaggctggggcaatggttgtgggctattcggaaaaggtagcttaataacgtgtgctaagtttaagtgtgtgacaaaactggaaggaaagatagtccaatatgaaaacttaaaatattcagtgatagtcaccgtacacactggagaccagcaccaagttggaaatgagaccacagaacatggaacaactgcaaccataacacctcaagctcccacgtcggaaatacagctgacagactacggagctctaacattggattgttcacctagaacagggctagactttaatgagatggtgttgttgacaatggaaaaaaaatcatggctcgtccacaaacaatggtttctagacttaccactgccttggacctcgggggcttcaacatcccaagagacttggaatagacaagacttgctggtcacatttaagacagctcatgcaaaaaagcaggaagtagtcgtactaggatcacaagaaggagcaatgcacactgcgttgactggagcgacagaaatccaaacgtctggaacgacaacaatttttgcaggacacctgaaatgcagactaaaaatggataaactgactttaaaagggatgtcatatgtaatgtgcacagggtcattcaagttagagaaggaagtggctgagacccagcatggaactgttctagtgcaggttaaatacgaaggaacagatgcaccatgcaagatccccttctcgtcccaagatgagaagggagtaacccagaatgggagattgataacagccaaccccatagtcactgacaaagaaaaaccagtcaacattgaagcggagccaccttttggtgagagctacattgtggtaggagcaggtgaaaaagctttgaaactaagctggttcaagaagggaagcagtatagggaaaatgtttgaagcaactgcccgtggagcacgaaggatggccatcctgggagacactgcatgggacttcggttctataggaggggtgttcacgtctgtgggaaaactgatacaccagatttttgggactgcgtatggagttttgttcagcggtgtttcttggaccatgaagataggaatagggattctgctgacatggctaggattaaactcaaggagcacgtccctttcaatgacgtgtatcgcagttggcatggtcacgctgtacctaggagtcatggttcaggcggactcgggatgtgtaatcaactggaaaggcagagaactcaaatgtggaagcggcatttttgtcaccaatgaagtccacacctggacagagcaatataaattccaggccgactcccctaagagactatcagcggccattgggaaggcatgggaggagggtgtgtgtggaattcgatcagccactcgtctcgagaacatcatgtggaagcaaatatcaaatgaattaaaccacatcttacttgaaaatgacatgaaatttacagtggtcgtaggagacgttagtggaatcttggcccaaggaaagaaaatgattaggccacaacccatggaacacaaatactcgtggaaaagctggggaaaagccaaaatcataggagcagatgtacagaataccaccttcatcatcgacggcccaaacaccccagaatgccctgataaccaaagagcatggaacatttgggaagttgaagactatggatttggaattttcacgacaaacatatggttgaaattgcgtgactcctacactcaagtgtgtgaccaccggctaatgtcagctgccatcaaggatagcaaagcagtccatgctgacatggggtactggatagaaagtgaaaagaacgagacttggaagttggcaagagcctccttcatagaagttaagacatgcatctggccaaaatcccacactctatggagcaatggagtcctggaaagtgagatgataatcccaaagatatatggaggaccaatatctcagcacaactacagaccaggatatttcacacaaacagcagggccgtggcacttgggcaagttagaactagattttgatttatgtgaaggtaccactgttgttgtggatgaacattgtggaaatcgaggaccatctcttagaaccacaacagtcacaggaaagacaatccatgaatggtgctgtagatcttgcacgttaccccccctacgtttcaaaggagaagacgggtgctggtacggcatggaaatcagaccagtcaaggagaaggaagagaacctagttaagtcaatggtctctgcagggtcaggagaagtggacagtttttcactaggactgctatgcatatcaataatgatcgaagaggtaatgagatccagatggagcagaaaaatgctgatgactggaacattggctgtgttcctccttctcacaatgggacaattgacatggaatgatctgatcaggctatgtatcatggttggagccaacgcttcagacaagatggggatgggaacaacgtacctagctttgatggccactttcagaatgagaccaatgttcgcagtcgggctactgtttcgcagattaacatctagagaagttcttcttcttacagttggattgagtctggtggcatctgtagaactaccaaattccttagaggagctaggggatggacttgcaatgggcatcatgatgttgaaattactgactgattttcagtcacatcagctatgggctaccttgctgtctttaacatttgtcaaaacaactttttcattgcactatgcatggaagacaatggctatgatactgtcaattgtatctctcttccctttatgcctgtccacgacttctcaaaaaacaacatggcttccggtgttgctgggatctcttggatgcaaaccactaaccatgtttcttataacagaaaacaaaatctggggaaggaaaagctggcctctcaatgaaggaattatggctgttggaatagttagcattcttctaagttcacttctcaagaatgatgtgccactagctggcccactaatagctggaggcatgctaatagcatgttatgtcatatctggaagctcggccgatttatcactggagaaagcggctgaggtctcctgggaagaagaagcagaacactctggtgcctcacacaacatactagtggaggtccaagatgatggaaccatgaagataaaggatgaagagagagatgacacactcaccattctcctcaaagcaactctgctagcaatctcaggggtatacccaatgtcaataccggcgaccctctttgtgtggtatttttggcagaaaaagaaacagagatcaggagtgctatgggacacacccagccctccagaagtggaaagagcagtccttgatgatggcatttatagaattctccaaagaggattgttgggcaggtctcaagtaggagtaggagtttttcaagaaggcgtgttccacacaatgtggcacgtcaccaggggagctgtcctcatgtaccaagggaagagactggaaccaagttgggccagtgtcaaaaaagacttgatctcatatggaggaggttggaggtttcaaggatcctggaacgcgggagaagaagtgcaggtgattgctgttgaaccggggaagaaccccaaaaatgtacagacagcgccgggtaccttcaagacccctgaaggcgaagttggagccatagctctagactttaaacccggcacatctggatctcctatcgtgaacagagagggaaaaatagtaggtctttatggaaatggagtggtgacaacaagtggtacctacgtcagcgccatagctcaagctaaagcatcacaagaagggcctctaccagagattgaggacgaggtgtttaggaaaagaaacttaacaataatggacctacatccaggatcggggaaaacaagaagatatcttccagccatagtccgtgaggccataagaaggaacgtgcgcacgctagtcttagctcccacaagagttgtcgcttctgaaatggcagaggcgctcaagggaatgccaataaggtatcagacaacagcagtgaagagtgaacacacaggaaaagagatagttgaccttatgtgtcacgccactttcactatgcgtctcctgtctcctgtgagagttcccaattataatatgattatcatggatgaagcacattttaccgatccagccagcatagcagccagagggtatatctcaacccgagtgggtatgggtgaagcagctgcgattttcatgacagccactccccccggatcggtggaggcctttccacagagcaatgcagttatccaagatgaggaaagagacattcctgaaagatcatggaactcaggctatgactggatcactgatttcccaggtaaaacagtctggtttgttccaagcatcaaatcaggaaatgacattgccaactgtttaagaaagaatgggaaacgggtggtccaattgagcagaaaaacttttgacactgagtaccagaaaacaaaaaataacgactgggactatgttgtcacaacagacatatccgaaatgggagcaaacttccgagccgacagggtaatagacccgaggcggtgcctgaaaccggtaatactaaaagatggcccagagcgtgtcattctagccggaccgatgccagtgactgtggctagcgccgcccagaggagaggaagaattggaaggaaccaaaataaggaaggcgatcagtatatttacatgggacagcctctaaacaatgatgaggaccacgcccattggacagaagcaaaaatgctccttgacaacataaacacaccagaagggattatcccagccctctttgagccggagagagaaaagagtgcagcaatagacggggaatacagactacggggtgaagcgaggaaaacgttcgtggagctcatgagaagaggagatctacctgtctggctatcctacaaagttgcctcagaaggcttccagtactccgacagaaggtggtgctttgatggggaaaggaacaaccaggtgttggaggagaacatggacgtggagatctggacaaaagaaggagaaagaaagaaactacgaccccgctggctggatgccagaacatactctgacccactggctctgcgcgaattcaaagagttcgcagcaggaagaagaagcgtctcaggtgacctaatattagaaatagggaaacttccacaacatttaacgcaaagggcccagaacgccttggacaatctggttatgttgcacaactctgaacaaggaggaaaagcctatagacacgccatggaagaactaccagacaccatagaaacgttaatgctcctagctttgatagctgtgctgactggtggagtgacgttgttcttcctatcaggaaggggtctaggaaaaacatccattggcctactctgcgtgattgcctcaagcgcactgctatggatggccagtgtggaaccccattggatagcggcctctatcatactggagttctttctgatggtgttgcttattccagagccggacagacagcgcactccacaagacaaccagctagcatacgtggtgataggtctgttattcatgatattgacagcggcagccaatgagatgggattactggaaaccacaaagaaggacctggggattggtcatgcagctgctgaaaaccaccatcatgctgcaatgctggacgtagacctacatccagcttcagcctggactctctatgcagtggccacaacaattatcactcccatgatgagacacacaattgaaaacacaacggcaaatatttccctgacagctattgcaaaccaggcagctatattgatgggacttgacaagggatggccaatatcaaagatggacataggagttccacttctcgccttggggtgctattctcaggtgaacccgctgacgctgacagcggcggtatttatgctagtggctcattatgccataattggacccggactgcaagcaaaagctactagagaagctcaaaaaaggacagcagccggaataatgaaaaacccaactgtcgacgggatcgttgcaatagatttggaccctgtggtttacgatgcaaaatttgaaaaacagctaggccaaataatgttgttgatactttgcacatcacagatcctcctgatgcggaccacatgggccttgtgtgaatccatcacactagccactggacctctgactacgctttgggagggatctccaggaaaattctggaacaccacgatagcggtgtccatggcaaacatttttaggggaagttatctagcaggagcaggtctggccttttcattaatgaaatctctaggaggaggtaggagaggcacgggagcccaaggggaaacactgggagaaaaatggaaaagacagctaaaccaattgagcaagtcagaattcaacacttacaaaaggagtgggattatagaggtggatagatctgaagccaaagaggggttaaaaagaggagaaccgactaaacacgcagtgtcgagaggaacggccaaactgaggtggtttgtggagaggaaccttgtgaaaccagaagggaaagtcatagacctcggttgtggaagaggtggctggtcatattattgcgctgggctgaagaaagtcacagaagtgaaaggatacacgaaaggaggacctggacatgaggaaccaatcccaatggcaacctatggatggaacctagtaaagctatactccgggaaagatgtattctttacaccacctgagaaatgtgacaccctcttgtgtgatattggtgagtcctctccgaacccaactatagaagaaggaagaacgttacgtgttctaaagatggtggaaccatggctcagaggaaaccaattttgcataaaaattctaaatccctatatgccgagtgtggtagaaactttggagcaaatgcaaagaaaacatggaggaatgctagtgcgaaatccactctcaagaaactccactcatgaaatgtactgggtttcatgtggaacaggaaacattgtgtcagcagtaaacatgacatctagaatgttgctaaatcgattcacaatggctcacaggaagccaacatatgaaagagacgtggacttaggcgctggaacaagacatgtggcagtagaaccagaggtggccaacctagatatcattggccagaggatagagaatataaaaaatggacacaaatcaacatggcactatgatgaggacaatccatacaaaacatgggcctatcatggatcatatgaggtcaagccatcaggatcagcctcatccatggtcaatggtgtggtgagactgctaaccaaaccatgggatgtcattcccatggtcacacaaatagccatgactgacaccacaccctttggacaacagagggtgtttaaagagaaagttgacacgcgtacaccaaaagcgaaacgaggcacagcacaaattatggaggtgacagccaggtggttatggggttttctctctagaaacaaaaaacccagaatctgcacaagagaggagttcacaagaaaagtcaggtcaaacgcagctattggagcagtgttcgttgatgaaaatcaatggaactcagcaaaagaggcagtggaagatgaacggttctgggaccttgtgcacagagagagggagcttcataaacaaggaaaatgtgccacgtgtgtctacaacatgatgggaaagagagagaaaaaattaggagagttcggaaaggcaaaaggaagtcgcgcaatatggtacatgtggttgggagcgcgctttttagagtttgaagcccttggtttcatgaatgaagatcactggttcagcagagagaattcactcagtggagtggaaggagaaggactccacaaacttggatacatactcagagacatatcaaagattccagggggaaatatgtatgcagatgacacagccggatgggacacaagaataacagaggatgatcttcagaatgaggccaaaatcactgacatcatggaacctgaacatgccctattggccacgtcaatctttaagctaacctaccaaaacaaggtagtaagggtgcagagaccagcgaaaaatggaaccgtgatggatgtcatatccagacgtgaccagagaggaagtggacaggttggaacctatggcttaaacaccttcaccaacatggaggcccaactaataagacaaatggagtctgagggaatcttttcacccagcgaattggaaaccccaaatctagccgaaagagtcctcgactggttgaaaaaacatggcaccgagaggctgaaaagaatggcaatcagtggagatgactgtgtggtgaaaccaatcgatgacagatttgcaacagccttaacagctttgaatgacatgggaaaggtaagaaaagacataccgcaatgggaaccttcaaaaggatggaatgattggcaacaagtgcctttctgttcacaccatttccaccagctgattatgaaggatgggagggagatagtggtgccatgccgcaaccaagatgaacttgtaggtagggccagagtatcacaaggcgccggatggagcttgagagaaactgcatgcctaggcaagtcatatgcacaaatgtggcagctgatgtacttccacaggagagacttgagattagcggctaatgctatctgttcagccgttccagttgattgggtcccaaccagccgtaccacctggtcgatccatgcccaccatcaatggatgacaacagaagacatgttgtcagtgtggaatagggtttggatagaggaaaacccatggatggaggacaagactcatgtgtccagttgggaagacgttccatacctaggaaaaagggaagatcgatggtgtggatccctaataggcttaacagcacgagccacctgggccaccaacatacaagtggccataaaccaagtgagaaggctcattgggaatgagaattatctagacttcatgacatcaatgaagagattcaaaaacgagagtgatcccgaaggggcactctggtaa

SEQ ID NO: 17 - DNA, 10735 bp, synthetic construct
  source 1..10735: mol_type = other DNA
agttgttagtctacgtggaccgacaagaacagtttcgaatcggaagcttgcttaacgtagttctaacagttttttattagagagcagatctctgatgaacaaccaacggaaaaagacgggtcgaccgtctttcaatatgctgaaacgcgcgagaaaccgcgtgtcaactgtgagccagctggccaagcggttctctaagggcctgctgagcggacagggaccaatgaagctggtcatggccttcatcgcctttctgagattcctggcaatcccacctaccgcaggcatcctggccagatggggcagcttcaagaagaacggcgccatcaaggtgctgagaggctttaagaaggagatcagcaacatgctgaatatcatgaaccggagaaagaggtctgtgaccatgctgctgatgctgctgcctacagccctggccttccacctgaccacacgcggcggagagccacacatgatcgtgtccaagcaggagcggggcaagtctctgctgtttaagaccagcgccggcgtgaatatgtgcacactgatcgctatggacctgggcgagctgtgcgaggatacaatgacctacaagtgtccaagaatcacagagacagagcccgacgatgtggactgctggtgtaacgccacagagacatgggtgacctatggcacatgttctcagaccggcgagcacaggcgcgataagagaagcgtggccctggcccctcacgtgggcctgggcctggagacaaggaccgagacatggatgagcagcgagggcgcctggaagcagatccagaaggtggagacatgggccctgaggcacccaggctttacagtgatcgccctgttcctggcacacgcaatcggcaccagcatcacacagaagggcatcatcttcatcctgctgatgctggtgacccccagcatggccatgagatgcgtgggcatcggcaaccgcgactttgtggagggcctgtctggagcaacctgggtggatgtggtgctggagcacggcagctgcgtgaccacaatggccaaggacaagcccaccctggacatcgagctgctgaagactgaggtgacaaatcctgccgtgctgcgcaagctgtgcatcgaggccaagatcagcaacaccacaaccgactctcggtgtccaacacagggagaggccaccctggtggaagagcaggacaccaatttcgtgtgccggcggaccttcgtggacagaggatggggaaacggatgtggcctgttcggcaagggctctctgatcacctgcgccaagtttaagtgcgtgacaaagctggagggcaagatcgtgcagtacgagaatctgaagtatagcgtgatcgtgaccgtgcacacaggcgaccagcaccaagtgggcaacgagacaaccgagcacggcacaaccgccaccatcacaccacaggcccccacatccgagatccagctgaccgactacggcgccctgacactggattgctctcctcgcacaggcctggatttcaatgagatggtgctgctgacaatggagaagaagagctggctggtgcacaagcagtggtttctggacctgccactgccttggaccagcggagccagcacatcccaggagacatggaaccggcaggatctgctggtgaccttcaagacagcccacgccaagaagcaggaggtggtggtgctgggctcccaggagggagcaatgcacaccgccctgacaggagccaccgagatccagacctctggcacaaccacaatcttcgccggccacctgaagtgcagacttaagatggacaagctgaccctgaagggcatgtcttacgtgatgtgcaccggcagctttaagctggagaaggaggtggccgagacacagcacggcaccgtgctggtgcaggtgaagtatgagggcaccgacgccccctgtaagatccctttctctagccaggatgagaagggcgtgacacagaatggcagactgatcaccgccaaccctatcgtgacagataaggagaagccagtgaatatcgaggccgagccaccctttggcgagtcctatatcgtggtgggagcaggagagaaggccctgaagctgtcttggttcaagaagggctcctctatcggcaagatgtttgaggcaaccgccaggggcgccaggaggatggccatcctgggcgacacagcctgggatttcggctccatcggcggcgtgtttacctctgtgggcaagctgatccaccagattttcggcacagcgtacggcgtgctgttttctggcgtgagctggaccatgaagatcggcatcggcatcctgctgacatggctgggcctgaactctaggagcacatccctgtctatgacctgcatcgccgtgggcatggtgaccctgtatctgggcgtgatggtgcaggcagacagcggatgcgtgatcaattggaagggcagagagctgaagtgtggctccggcatcttcgtgaccaacgaggtgcacacctggacagagcagtacaagtttcaggccgattcccccaagaggctgtctgccgcaatcggcaaggcctgggaggagggcgtgtgcggcatcaggtccgccacccgcctggagaatatcatgtggaagcagatcagcaatgagctgaaccacatcctgctggagaacgacatgaagttcacagtggtggtgggcgatgtgagcggcatcctggcacagggcaagaagatgatccgcccacagcctatggagcacaagtactcctggaagtcttggggcaaggccaagatcatcggcgccgatgtacagaataccaccttcatcatcgatggccctaacaccccagagtgccccgacaatcagcgggcctggaacatctgggaggtggaggactacggctttggcatcttcaccacaaatatctggctgaagctgagagactcctatacccaggtgtgcgatcacaggctgatgagcgccgccatcaaggactccaaggccgtgcacgccgatatgggctattggatcgagagcgagaagaacgagacatggaagctggccagagcctccttcatcgaggtgaagacctgcatctggcccaagagccacacactgtggtccaatggcgtgctggagagcgagatgatcatccctaaaatctacggcggcccaatctcccagcacaactacaggccaggctatttcacccagacagcaggaccctggcacctgggcaagctggagctggactttgatctgtgcgagggtaccacagtggtggtggacgagcactgtggcaatcggggccccagcctgagaaccacaaccgtgacaggcaagaccatccacgagtggtgctgtaggtcctgcaccctgcctccactgcgcttcaagggcgaggacggctgttggtacggcatggagatccgccctgtgaaggagaaggaggagaacctggtgaagagcatggtgtccgccggctctggagaggtggatagcttctccctgggcctgctgtgcatcagcatcatgatcgaggaagtgatgcggagcagatggtcccgcaagatgctgatgaccggcacactggccgtgtttctgctgctgacaatgggccagctgacctggaatgacctgatccggctgtgcatcatggtgggcgccaacgcctccgataagatgggcatgggcacaacctatctggccctgatggccacctttaggatgcgccctatgttcgccgtgggcctgctgtttcggagactgaccagccgggaggtgctgctgctgacagtgggcctgtccctggtggcctctgtggagctgccaaactccctggaggagctgggcgacgggctggcaatggggatcatgatgctgaagctgctgaccgatttccagtcccaccagctgtgggccacactgctgtctctgacctttgtgaagacaaccttcagcctgcactacgcctggaagacaatggccatgatcctgtctatcgtgagcctgttcccactgtgcctgtccacaacctctcagaagacaacctggctgccagtgctgctgggcagcctgggctgtaagcccctgacaatgtttctgatcaccgagaacaagatttggggaaggaagagctggcccctgaacgagggcatcatggccgtgggcatcgtgtccatcctgctgagcagcctgctgaagaatgacgtgccactggccggaccactgatcgcaggaggcatgctgatcgcctgctatgtgatcagcggctctagcgccgatctgtccctggagaaggcagcagaggtgtcctgggaggaggaggcagagcacagcggagcctcccacaacatcctggtggaggtgcaggacgatggcaccatgaagatcaaggacgaggagcgggacgataccctgacaatcctgctgaaggccaccctgctggccatctctggcgtgtaccctatgagcatcccagccacactgttcgtgtggtatttctggcagaagaagaagcagcgcagcggcgtgctgtgggataccccttccccacctgaggtggagagggccgtgctggacgatggaatctacagaatcctgcagagaggcctgctgggcagaagccaggtcggagtgggcgtgtttcaggagggcgtgttccacacaatgtggcacgtgacccgcggcgccgtgctgatgtaccagggcaagcggctggagccatcttgggccagcgtgaagaaggacctgatcagctatggcggaggatggaggttccagggatcctggaacgcgggagaagaagtgcaggtgattgctgttgaaccggggaagaaccccaaaaacgtacagacagcgccgggcaccttcaagacccctgaaggcgaagttggagccatagctctagactttaaacccggcacatctggatctcctatcgtgaacagagagggaaaaatagtaggtctttatggaaatggagtggtgacaacaagtggcacctacgtcagcgccatagctcaagctaaagcatcacaagaagggcctctaccagagattgaggacgaggtgtttaggaaaagaaacttaacaataatggacctacatccaggatcggggaaaacaagaagatatcttccagccatagtccgtgaggccataagaaggaacgtgcgcacgctagtcttagctcccacaagagttgtcgcttctgaaatggcagaggcgctcaagggaatgccaataaggtatcagacaacagcagtgaagagtgaacacacaggaaaagagatagttgaccttatgtgtcacgccactttcactatgcgtctcctgtctcctgtgagagttcccaattataatatgattatcatggatgaagcacattttaccgatccagccagcatagcagccagagggtatatctcaacccgagtgggtatgggtgaagcagctgcgattttcatgacagccactccccccggatcggtggaggcctttccacagagcaatgcagttatccaagatgaggaaagagacattcctgaaagatcatggaactcaggctatgactggatcactgatttcccaggtaaaacagtctggtttgttccaagcatcaaatcaggaaatgacattgccaactgtttaagaaagaatgggaaacgggtggtccaattgagcagaaaaacttttgacactgagtaccagaaaacaaaaaataacgactgggactatgttgtcacaacagacatatccgaaatgggagcaaacttccgagccgacagggtaatagacccgaggcggtgcctgaaacctgtaatactaaaagatggcccagagcgtgtcattctagccggaccgatgccagtgactgtggccagcgccgcccagaggagaggaagaattggaaggaaccaaaataaggaaggcgatcagtatatttacatgggacagcctctaaacaatgatgaggaccacgcccattggacagaagcaaaaatgctccttgacaacataaacacaccagaagggattatcccagccctctttgagccggagagagaaaagagtgcagcaatagacggggaatacagactacggggtgaagcgaggaaaacgttcgtggagctgatgagaagaggagatctacctgtctggctatcctacaaagttgcctcagaaggcttccagtactccgacagaaggtggtgctttgatggggaaaggaacaaccaggtgttggaggagaacatggacgtggagatctggacaaaagaaggagaaagaaagaaactacgaccccgctggctggatgccagaacatactctgacccactggctctgcgcgaattcaaagagttcgcagcaggaagaagaagcgtctcaggtgacctaatattagaaatagggaaacttccacaacatttaacgcaaagggcccagaacgccttggacaatctggttatgttgcacaactctgaacaaggaggaaaagcctatagacacgccatggaagaactaccagacaccatagaaacgttaatgctcctagctttgatagctgtgctgactggtggagtgacgttgttcttcctatcaggaaggggtctaggaaaaacatccattggcctactctgcgtgattgcctcaagcgcactgctatggatggccagtgtggaaccccattggatagcggcctctatcatactggagttctttctgatggtgttgcttattccagagccggacagacagcgcactccacaagacaaccagctagcatacgtggtgataggtctgttattcatgatattgacagcggcagccaatgagatgggattactggaaaccacaaagaaggacctggggattggtcatgcagctgctgaaaaccaccatcatgctgcaatgctggacgtagacctacatccagcttcagcctggactctctatgcagtggccacaacaattatcactcccatgatgagacacacaattgaaaacacaacggcaaatatttccctgacagctattgcaaaccaggcagctatattgatgggacttgacaagggatggccaatatcaaagatggacataggagttccacttctcgccttggggtgctattctcaggtgaacccgctgacgctgacagcggcggtatttatgctagtggctcattatgccataattggacccggactgcaagcaaaagctactagagaagctcaaaaaaggacagcagccggaataatgaaaaacccaactgtcgacgggatcgttgcaatagatttggaccctgtggtttacgatgcaaaatttgaaaaacagctaggccaaataatgttgttgatactttgcacatcacagatcctcctgatgcggaccacatgggccttgtgtgaatccatcacactagccactggacctctgactacgctttgggagggatctccaggaaaattctggaacaccacgatagcggtgtccatggcaaacatttttaggggaagttatctagcaggagcaggtctggccttttcattaatgaaatctctaggaggaggtaggagaggcacgggagcccaaggggaaacactgggagaaaaatggaaaagacagctaaaccaattgagcaagtcagaattcaacacttacaaaaggagtgggattatagaggtggatagatctgaagccaaagaggggttaaaaagaggagaaccgactaaacacgcagtgtcgagaggaacggccaaactgaggtggtttgtggagaggaaccttgtgaaaccagaagggaaagtcatagacctcggttgtggaagaggtggctggtcatattattgcgctgggctgaagaaagtcacagaagtgaaaggatacacgaaaggaggacctggacatgaggaaccaatcccaatggcaacctatggatggaacctagtaaagctatactccgggaaagatgtattctttacaccacctgagaaatgtgacaccctcttgtgtgatattggtgagtcctctccgaacccaactatagaagaaggaagaacgttacgtgttctaaagatggtggaaccatggctcagaggaaaccaattttgcataaaaattctaaatccctatatgccgagtgtggtagaaactttggagcaaatgcaaagaaaacatggaggaatgctagtgcgaaatccactctcaagaaactccactcatgaaatgtactgggtttcatgtggaacaggaaacattgtgtcagcagtaaacatgacatctagaatgttgctaaatcgattcacaatggctcacaggaagccaacatatgaaagagacgtggacttaggcgctggaacaagacatgtggcagtagaaccagaggtggccaacctagatatcattggccagaggatagagaatataaaaaatggacacaaatcaacatggcactatgatgaggacaatccatacaaaacatgggcctatcatggatcatatgaggtcaagccatcaggatcagcctcatccatggtcaatggtgtggtgagactgctaaccaaaccatgggacgtcattcccatggtcacacaaatagccatgactgacaccacaccctttggacaacagagggtgtttaaagagaaagttgacacgcggacaccaaaagcgaaacgaggcacagcacaaattatggaggtgacagccaggtggttatggggttttctctctagaaacaaaaaacccagaatctgcacaagagaggagttcacaagaaaagtcaggtcaaacgcagctattggagcagtgttcgttgatgaaaatcaatggaactcagcaaaagaggcagtggaagatgaacggttctgggaccttgtgcacagagagagggagcttcataaacaaggaaaatgtgccacgtgtgtctacaacatgatgggaaagagagagaaaaaattaggagagttcggaaaggcaaaaggaagtcgcgcaatatggtacatgtggttgggagcgcgctttttagagtttgaagcccttggtttcatgaatgaagatcactggttcagcagagagaattcactcagtggagtggaaggagaaggactccacaaacttggatacatactcagagacatatcaaagattccagggggaaatatgtatgcagatgacacagccggatgggacacaagaataacagaggatgatcttcagaatgaggccaaaatcactgacatcatggaacctgaacatgccctattggccacgtcaatctttaagctaacctaccaaaacaaggtagtaagggtgcagagaccagcgaaaaatggaaccgtgatggatgtcatatccagacgtgaccagagaggaagtggacaggttggaacctatggcttaaacaccttcaccaacatggaggcccaactaataagacaaatggagtctgagggaatcttttcacccagcgaattggaaaccccaaatctagccgaaagagtcctcgactggttgaaaaaacatggcaccgagaggctgaaaagaatggcaatcagtggagatgactgtgtggtgaaaccaatcgatgacagatttgcaacagccttaacagctttgaatgacatgggaaaggtaagaaaagacataccgcaatgggaaccttcaaaaggatggaatgattggcaacaagtgcctttctgttcacaccatttccaccagctgattatgaaggatgggagggagatagtggtgccatgccgcaaccaagatgaacttgtaggtagggccagagtatcacaaggcgccggatggagcttgagagaaactgcatgcctaggcaagtcatatgcacaaatgtggcagctgatgtacttccacaggagagacttgagattagcggctaatgctatctgttcagccgttccagttgattgggtcccaaccagccgtaccacctggtcgatccatgcccaccatcaatggatgacaacagaagacatgttgtcagtgtggaatagggtttggatagaggaaaacccatggatggaggacaagactcatgtgtccagttgggaagacgttccatacctgggaaaaagggaagatcgatggtgtggctccctaataggcttaacagcacgagccacctgggccaccaacatacaagtggccataaaccaagtgagaaggctcattgggaatgagaattatctagacttcatgacatcaatgaagagattcaaaaacgagagtgatcccgaaggggcactctggtaagccaactcattcacaaaataaaggaaaataaaaaatcaaacaaggcaagaagtcaggccggattaagccatagcacggtaagagctatgctgcctgtgagccccgtccaaggacgtaaaatgaagtcaggccgaaagccacggttcgagcaagccgtgctgcctgtagctccatcgtggggatgtaaaaacccgggaggctgcaaaccatggaagctgtacgcatggggtagcagactagtggttagaggagacccctcccaagacacaacgcagcagcggggcccaacaccaggggaagctgtaccctggtggtaaggactagaggttagaggagaccccccgcacaacaacaaacagcatattgacgctgggagagaccagagatcctgctgtctctacagcatcattccaggcacagaacgccaaaaaatggaatggtgctgttgaatcaacaggttct

SEQ ID NO: 18 - DNA, 10179 bp, synthetic construct
  source 1..10179: mol_type = other DNA
atgaacaaccaacggaaaaagacgggtcgaccgtctttcaatatgctgaaacgcgcgagaaaccgcgtgtcaactgtgagccagctggccaagcggttctctaagggcctgctgagcggacagggaccaatgaagctggtcatggccttcatcgcctttctgagattcctggcaatcccacctaccgcaggcatcctggccagatggggcagcttcaagaagaacggcgccatcaaggtgctgagaggctttaagaaggagatcagcaacatgctgaatatcatgaaccggagaaagaggtctgtgaccatgctgctgatgctgctgcctacagccctggccttccacctgaccacacgcggcggagagccacacatgatcgtgtccaagcaggagcggggcaagtctctgctgtttaagaccagcgccggcgtgaatatgtgcacactgatcgctatggacctgggcgagctgtgcgaggatacaatgacctacaagtgtccaagaatcacagagacagagcccgacgatgtggactgctggtgtaacgccacagagacatgggtgacctatggcacatgttctcagaccggcgagcacaggcgcgataagagaagcgtggccctggcccctcacgtgggcctgggcctggagacaaggaccgagacatggatgagcagcgagggcgcctggaagcagatccagaaggtggagacatgggccctgaggcacccaggctttacagtgatcgccctgttcctggcacacgcaatcggcaccagcatcacacagaagggcatcatcttcatcctgctgatgctggtgacccccagcatggccatgagatgcgtgggcatcggcaaccgcgactttgtggagggcctgtctggagcaacctgggtggatgtggtgctggagcacggcagctgcgtgaccacaatggccaaggacaagcccaccctggacatcgagctgctgaagactgaggtgacaaatcctgccgtgctgcgcaagctgtgcatcgaggccaagatcagcaacaccacaaccgactctcggtgtccaacacagggagaggccaccctggtggaagagcaggacaccaatttcgtgtgccggcggaccttcgtggacagaggatggggaaacggatgtggcctgttcggcaagggctctctgatcacctgcgccaagtttaagtgcgtgacaaagctggagggcaagatcgtgcagtacgagaatctgaagtatagcgtgatcgtgaccgtgcacacaggcgaccagcaccaagtgggcaacgagacaaccgagcacggcacaaccgccaccatcacaccacaggcccccacatccgagatccagctgaccgactacggcgccctgacactggattgctctcctcgcacaggcctggatttcaatgagatggtgctgctgacaatggagaagaagagctggctggtgcacaagcagtggtttctggacctgccactgccttggaccagcggagccagcacatcccaggagacatggaaccggcaggatctgctggtgaccttcaagacagcccacgccaagaagcaggaggtggtggtgctgggctcccaggagggagcaatgcacaccgccctgacaggagccaccgagatccagacctctggcacaaccacaatcttcgccggccacctgaagtgcagacttaagatggacaagctgaccctgaagggcatgtcttacgtgatgtgcaccggcagctttaagctggagaaggaggtggccgagacacagcacggcaccgtgctggtgcaggtgaagtatgagggcaccgacgccccctgtaagatccctttctctagccaggatgagaagggcgtgacacagaatggcagactgatcaccgccaaccctatcgtgacagataaggagaagccagtgaatatcgaggccgagccaccctttggcgagtcctatatcgtggtgggagcaggagagaaggccctgaagctgtcttggttcaagaagggctcctctatcggcaagatgtttgaggcaaccgccaggggcgccaggaggatggccatcctgggcgacacagcctgggatttcggctccatcggcggcgtgtttacctctgtgggcaagctgatccaccagattttcggcacagcgtacggcgtgctgttttctggcgtgagctggaccatgaagatcggcatcggcatcctgctgacatggctgggcctgaactctaggagcacatccctgtctatgacctgcatcgccgtgggcatggtgaccctgtatctgggcgtgatggtgcaggcagacagcggatgcgtgatcaattggaagggcagagagctgaagtgtggctccggcatcttcgtgaccaacgaggtgcacacctggacagagcagtacaagtttcaggccgattcccccaagaggctgtctgccgcaatcggcaaggcctgggaggagggcgtgtgcggcatcaggtccgccacccgcctggagaatatcatgtggaagcagatcagcaatgagctgaaccacatcctgctggagaacgacatgaagttcacagtggtggtgggcgatgtgagcggcatcctggcacagggcaagaagatgatccgcccacagcctatggagcacaagtactcctggaagtcttggggcaaggccaagatcatcggcgccgatgtacagaataccaccttcatcatcgatggccctaacaccccagagtgccccgacaatcagcgggcctggaacatctgggaggtggaggactacggctttggcatcttcaccacaaatatctggctgaagctgagagactcctatacccaggtgtgcgatcacaggctgatgagcgccgccatcaaggactccaaggccgtgcacgccgatatgggctattggatcgagagcgagaagaacgagacatggaagctggccagagcctccttcatcgaggtgaagacctgcatctggcccaagagccacacactgtggtccaatggcgtgctggagagcgagatgatcatccctaaaatctacggcggcccaatctcccagcacaactacaggccaggctatttcacccagacagcaggaccctggcacctgggcaagctggagctggactttgatctgtgcgagggtaccacagtggtggtggacgagcactgtggcaatcggggccccagcctgagaaccacaaccgtgacaggcaagaccatccacgagtggtgctgtaggtcctgcaccctgcctccactgcgcttcaagggcgaggacggctgttggtacggcatggagatccgccctgtgaaggagaaggaggagaacctggtgaagagcatggtgtccgccggctctggagaggtggatagcttctccctgggcctgctgtgcatcagcatcatgatcgaggaagtgatgcggagcagatggtcccgcaagatgctgatgaccggcacactggccgtgtttctgctgctgacaatgggccagctgacctggaatgacctgatccggctgtgcatcatggtgggcgccaacgcctccgataagatgggcatgggcacaacctatctggccctgatggccacctttaggatgcgccctatgttcgccgtgggcctgctgtttcggagactgaccagccgggaggtgctgctgctgacagtgggcctgtccctggtggcctctgtggagctgccaaactccctggaggagctgggcgacgggctggcaatggggatcatgatgctgaagctgctgaccgatttccagtcccaccagctgtgggccacactgctgtctctgacctttgtgaagacaaccttcagcctgcactacgcctggaagacaatggccatgatcctgtctatcgtgagcctgttcccactgtgcctgtccacaacctctcagaagacaacctggctgccagtgctgctgggcagcctgggctgtaagcccctgacaatgtttctgatcaccgagaacaagatttggggaaggaagagctggcccctgaacgagggcatcatggccgtgggcatcgtgtccatcctgctgagcagcctgctgaagaatgacgtgccactggccggaccactgatcgcaggaggcatgctgatcgcctgctatgtgatcagcggctctagcgccgatctgtccctggagaaggcagcagaggtgtcctgggaggaggaggcagagcacagcggagcctcccacaacatcctggtggaggtgcaggacgatggcaccatgaagatcaaggacgaggagcgggacgataccctgacaatcctgctgaaggccaccctgctggccatctctggcgtgtaccctatgagcatcccagccacactgttcgtgtggtatttctggcagaagaagaagcagcgcagcggcgtgctgtgggataccccttccccacctgaggtggagagggccgtgctggacgatggaatctacagaatcctgcagagaggcctgctgggcagaagccaggtcggagtgggcgtgtttcaggagggcgtgttccacacaatgtggcacgtgacccgcggcgccgtgctgatgtaccagggcaagcggctggagccatcttgggccagcgtgaagaaggacctgatcagctatggcggaggatggaggttccagggatcctggaacgcgggagaagaagtgcaggtgattgctgttgaaccggggaagaaccccaaaaacgtacagacagcgccgggcaccttcaagacccctgaaggcgaagttggagccatagctctagactttaaacccggcacatctggatctcctatcgtgaacagagagggaaaaatagtaggtctttatggaaatggagtggtgacaacaagtggcacctacgtcagcgccatagctcaagctaaagcatcacaagaagggcctctaccagagattgaggacgaggtgtttaggaaaagaaacttaacaataatggacctacatccaggatcggggaaaacaagaagatatcttccagccatagtccgtgaggccataagaaggaacgtgcgcacgctagtcttagctcccacaagagttgtcgcttctgaaatggcagaggcgctcaagggaatgccaataaggtatcagacaacagcagtgaagagtgaacacacaggaaaagagatagttgaccttatgtgtcacgccactttcactatgcgtctcctgtctcctgtgagagttcccaattataatatgattatcatggatgaagcacattttaccgatccagccagcatagcagccagagggtatatctcaacccgagtgggtatgggtgaagcagctgcgattttcatgacagccactccccccggatcggtggaggcctttccacagagcaatgcagttatccaagatgaggaaagagacattcctgaaagatcatggaactcaggctatgactggatcactgatttcccaggtaaaacagtctggtttgttccaagcatcaaatcaggaaatgacattgccaactgtttaagaaagaatgggaaacgggtggtccaattgagcagaaaaacttttgacactgagtaccagaaaacaaaaaataacgactgggactatgttgtcacaacagacatatccgaaatgggagcaaacttccgagccgacagggtaatagacccgaggcggtgcctgaaacctgtaatactaaaagatggcccagagcgtgtcattctagccggaccgatgccagtgactgtggccagcgccgcccagaggagaggaagaattggaaggaaccaaaataaggaaggcgatcagtatatttacatgggacagcctctaaacaatgatgaggaccacgcccattggacagaagcaaaaatgctccttgacaacataaacacaccagaagggattatcccagccctctttgagccggagagagaaaagagtgcagcaatagacggggaatacagactacggggtgaagcgaggaaaacgttcgtggagctgatgagaagaggagatctacctgtctggctatcctacaaagttgcctcagaaggcttccagtactccgacagaaggtggtgctttgatggggaaaggaacaaccaggtgttggaggagaacatggacgtggagatctggacaaaagaaggagaaagaaagaaactacgaccccgctggctggatgccagaacatactctgacccactggctctgcgcgaattcaaagagttcgcagcaggaagaagaagcgtctcaggtgacctaatattagaaatagggaaacttccacaacatttaacgcaaagggcccagaacgccttggacaatctggttatgttgcacaactctgaacaaggaggaaaagcctatagacacgccatggaagaactaccagacaccatagaaacgttaatgctcctagctttgatagctgtgctgactggtggagtgacgttgttcttcctatcaggaaggggtctaggaaaaacatccattggcctactctgcgtgattgcctcaagcgcactgctatggatggccagtgtggaaccccattggatagcggcctctatcatactggagttctttctgatggtgttgcttattccagagccggacagacagcgcactccacaagacaaccagctagcatacgtggtgataggtctgttattcatgatattgacagcggcagccaatgagatgggattactggaaaccacaaagaaggacctggggattggtcatgcagctgctgaaaaccaccatcatgctgcaatgctggacgtagacctacatccagcttcagcctggactctctatgcagtggccacaacaattatcactcccatgatgagacacacaattgaaaacacaacggcaaatatttccctgacagctattgcaaaccaggcagctatattgatgggacttgacaagggatggccaatatcaaagatggacataggagttccacttctcgccttggggtgctattctcaggtgaacccgctgacgctgacagcggcggtatttatgctagtggctcattatgccataattggacccggactgcaagcaaaagctactagagaagctcaaaaaaggacagcagccggaataatgaaaaacccaactgtcgacgggatcgttgcaatagatttggaccctgtggtttacgatgcaaaatttgaaaaacagctaggccaaataatgttgttgatactttgcacatcacagatcctcctgatgcggaccacatgggccttgtgtgaatccatcacactagccactggacctctgactacgctttgggagggatctccaggaaaattctggaacaccacgatagcggtgtccatggcaaacatttttaggggaagttatctagcaggagcaggtctggccttttcattaatgaaatctctaggaggaggtaggagaggcacgggagcccaaggggaaacactgggagaaaaatggaaaagacagctaaaccaattgagcaagtcagaattcaacacttacaaaaggagtgggattatagaggtggatagatctgaagccaaagaggggttaaaaagaggagaaccgactaaacacgcagtgtcgagaggaacggccaaactgaggtggtttgtggagaggaaccttgtgaaaccagaagggaaagtcatagacctcggttgtggaagaggtggctggtcatattattgcgctgggctgaagaaagtcacagaagtgaaaggatacacgaaaggaggacctggacatgaggaaccaatcccaatggcaacctatggatggaacctagtaaagctatactccgggaaagatgtattctttacaccacctgagaaatgtgacaccctcttgtgtgatattggtgagtcctctccgaacccaactatagaagaaggaagaacgttacgtgttctaaagatggtggaaccatggctcagaggaaaccaattttgcataaaaattctaaatccctatatgccgagtgtggtagaaactttggagcaaatgcaaagaaaacatggaggaatgctagtgcgaaatccactctcaagaaactccactcatgaaatgtactgggtttcatgtggaacaggaaacattgtgtcagcagtaaacatgacatctagaatgttgctaaatcgattcacaatggctcacaggaagccaacatatgaaagagacgtggacttaggcgctggaacaagacatgtggcagtagaaccagaggtggccaacctagatatcattggccagaggatagagaatataaaaaatggacacaaatcaacatggcactatgatgaggacaatccatacaaaacatgggcctatcatggatcatatgaggtcaagccatcaggatcagcctcatccatggtcaatggtgtggtgagactgctaaccaaaccatgggacgtcattcccatggtcacacaaatagccatgactgacaccacaccctttggacaacagagggtgtttaaagagaaagttgacacgcggacaccaaaagcgaaacgaggcacagcacaaattatggaggtgacagccaggtggttatggggttttctctctagaaacaaaaaacccagaatctgcacaagagaggagttcacaagaaaagtcaggtcaaacgcagctattggagcagtgttcgttgatgaaaatcaatggaactcagcaaaagaggcagtggaagatgaacggttctgggaccttgtgcacagagagagggagcttcataaacaaggaaaatgtgccacgtgtgtctacaacatgatgggaaagagagagaaaaaattaggagagttcggaaaggcaaaaggaagtcgcgcaatatggtacatgtggttgggagcgcgctttttagagtttgaagcccttggtttcatgaatgaagatcactggttcagcagagagaattcactcagtggagtggaaggagaaggactccacaaacttggatacatactcagagacatatcaaagattccagggggaaatatgtatgcagatgacacagccggatgggacacaagaataacagaggatgatcttcagaatgaggccaaaatcactgacatcatggaacctgaacatgccctattggccacgtcaatctttaagctaacctaccaaaacaaggtagtaagggtgcagagaccagcgaaaaatggaaccgtgatggatgtcatatccagacgtgaccagagaggaagtggacaggttggaacctatggcttaaacaccttcaccaacatggaggcccaactaataagacaaatggagtctgagggaatcttttcacccagcgaattggaaaccccaaatctagccgaaagagtcctcgactggttgaaaaaacatggcaccgagaggctgaaaagaatggcaatcagtggagatgactgtgtggtgaaaccaatcgatgacagatttgcaacagccttaacagctttgaatgacatgggaaaggtaagaaaagacataccgcaatgggaaccttcaaaaggatggaatgattggcaacaagtgcctttctgttcacaccatttccaccagctgattatgaaggatgggagggagatagtggtgccatgccgcaaccaagatgaacttgtaggtagggccagagtatcacaaggcgccggatggagcttgagagaaactgcatgcctaggcaagtcatatgcacaaatgtggcagctgatgtacttccacaggagagacttgagattagcggctaatgctatctgttcagccgttccagttgattgggtcccaaccagccgtaccacctggtcgatccatgcccaccatcaatggatgacaacagaagacatgttgtcagtgtggaatagggtttggatagaggaaaacccatggatggaggacaagactcatgtgtccagttgggaagacgttccatacctgggaaaaagggaagatcgatggtgtggctccctaataggcttaacagcacgagccacctgggccaccaacatacaagtggccataaaccaagtgagaaggctcattgggaatgagaattatctagacttcatgacatcaatgaagagattcaaaaacgagagtgatcccgaaggggcactctggtaa

SEQ ID NO: 19 - DNA, 10735 bp, synthetic construct
  source 1..10735: mol_type = other DNA
agttgttagtctacgtggaccgacaagaacagtttcgaatcggaagcttgcttaacgtagttctaacagttttttattagagagcagatctctgatgaacaaccaacggaaaaagacgggtcgaccgtctttcaatatgctgaaacgcgcgagaaaccgcgtgtcaactgtgagccagctggccaagcggttctctaagggcctgctgagcggacagggaccaatgaagctggtcatggccttcatcgcctttctgagattcctggcaatcccacctaccgcaggcatcctggccagatggggcagcttcaagaagaacggcgccatcaaggtgctgagaggctttaagaaggagatcagcaacatgctgaatatcatgaaccggagaaagaggtctgtgaccatgctgctgatgctgctgcctacagccctggccttccacctgaccacacgcggcggagagccacacatgatcgtgtccaagcaggagcggggcaagtctctgctgtttaagaccagcgccggcgtgaatatgtgcacactgatcgctatggacctgggcgagctgtgcgaggatacaatgacctacaagtgtccaagaatcacagagacagagcccgacgatgtggactgctggtgtaacgccacagagacatgggtgacctatggcacatgttctcagaccggcgagcacaggcgcgataagagaagcgtggccctggcccctcacgtgggcctgggcctggagacaaggaccgagacatggatgagcagcgagggcgcctggaagcagatccagaaggtggagacatgggccctgaggcacccaggctttacagtgatcgccctgttcctggcacacgcaatcggcaccagcatcacacagaagggcatcatcttcatcctgctgatgctggtgacccccagcatggccatgagatgcgtgggcatcggcaaccgcgactttgtggagggcctgtctggagcaacctgggtggatgtggtgctggagcacggcagctgcgtgaccacaatggccaaggacaagcccaccctggacatcgagctgctgaagactgaggtgacaaatcctgccgtgctgcgcaagctgtgcatcgaggccaagatcagcaacaccacaaccgactctcggtgtccaacacagggagaggccaccctggtggaagagcaggacaccaatttcgtgtgccggcggaccttcgtggacagaggatggggaaacggatgtggcctgttcggcaagggctctctgatcacctgcgccaagtttaagtgcgtgacaaagctggagggcaagatcgtgcagtacgagaatctgaagtatagcgtgatcgtgaccgtgcacacaggcgaccagcaccaagtgggcaacgagacaaccgagcacggcacaaccgccaccatcacaccacaggcccccacatccgagatccagctgaccgactacggcgccctgacactggattgctctcctcgcacaggcctggatttcaatgagatggtgctgctgacaatggagaagaagagctggctggtgcacaagcagtggtttctggacctgccactgccttggaccagcggagccagcacatcccaggagacatggaaccggcaggatctgctggtgaccttcaagacagcccacgccaagaagcaggaggtggtggtgctgggctcccaggagggagcaatgcacaccgccctgacaggagccaccgagatccagacctctggcacaaccacaatcttcgccggccacctgaagtgcagacttaagatggacaagctgaccctgaagggcatgtcttacgtgatgtgcaccggcagctttaagctggagaaggaggtggccgagacacagcacggcaccgtgctggtgcaggtgaagtatgagggcaccgacgccccctgtaagatccctttctctagccaggatgagaagggcgtgacacagaatggcagactgatcaccgccaaccctatcgtgacagataaggagaagccagtgaatatcgaggccgagccaccctttggcgagtcctatatcgtggtgggagcaggagagaaggccctgaagctgtcttggttcaagaagggctcctctatcggcaagatgtttgaggcaaccgccaggggcgccaggaggatggccatcctgggcgacacagcctgggatttcggctccatcggcggcgtgtttacctctgtgggcaagctgatccaccagattttcggcacagcgtacggcgtgctgttttctggcgtgagctggaccatgaagatcggcatcggcatcctgctgacatggctgggcctgaactctaggagcacatccctgtctatgacctgcatcgccgtgggcatggtgaccctgtatctgggcgtgatggtgcaggcagacagcggatgcgtgatcaattggaagggcagagagctgaagtgtggctccggcatcttcgtgaccaacgaggtgcacacctggacagagcagtacaagtttcaggccgattcccccaagaggctgtctgccgcaatcggcaaggcctgggaggagggcgtgtgcggcatcaggtccgccacccgcctggagaatatcatgtggaagcagatcagcaatgagctgaaccacatcctgctggagaacgacatgaagttcacagtggtggtgggcgatgtgagcggcatcctggcacagggcaagaagatgatccgcccacagcctatggagcacaagtactcctggaagtcttggggcaaggccaagatcatcggcgccgatgtacagaataccaccttcatcatcgatggccctaacaccccagagtgccccgacaatcagcgggcctggaacatctgggaggtggaggactacggctttggcatcttcaccacaaatatctggctgaagctgagagactcctatacccaggtgtgcgatcacaggctgatgagcgccgccatcaaggactccaaggccgtgcacgccgatatgggctattggatcgagagcgagaagaacgagacatggaagctggccagagcctccttcatcgaggtgaagacctgcatctggcccaagagccacacactgtggtccaatggcgtgctggagagcgagatgatcatccctaaaatctacggcggcccaatctcccagcacaactacaggccaggctatttcacccagacagcaggaccctggcacctgggcaagctggagctggactttgatctgtgcgagggtaccacagtggtggtggacgagcactgtggcaatcggggccccagcctgagaaccacaaccgtgacaggcaagaccatccacgagtggtgctgtaggtcctgcaccctgcctccactgcgcttcaagggcgaggacggctgttggtacggcatggagatccgccctgtgaaggagaaggaggagaacctggtgaagagcatggtgtccgccggctctggagaggtggatagcttctccctgggcctgctgtgcatcagcatcatgatcgaggaagtgatgcggagcagatggtcccgcaagatgctgatgaccggcacactggccgtgtttctgctgctgacaatgggccagctgacctggaatgacctgatccggctgtgcatcatggtgggcgccaacgcctccgataagatgggcatgggcacaacctatctggccctgatggccacctttaggatgcgccctatgttcgccgtgggcctgctgtttcggagactgaccagccgggaggtgctgctgctgacagtgggcctgtccctggtggcctctgtggagctgccaaactccctggaggagctgggcgacgggctggcaatggggatcatgatgctgaagctgctgaccgatttccagtcccaccagctgtgggccacactgctgtctctgacctttgtgaagacaaccttcagcctgcactacgcctggaagacaatggccatgatcctgtctatcgtgagcctgttcccactgtgcctgtccacaacctctcagaagacaacctggctgccagtgctgctgggcagcctgggctgtaagcccctgacaatgtttctgatcaccgagaacaagatttggggaaggaagagctggcccctgaacgagggcatcatggccgtgggcatcgtgtccatcctgctgagcagcctgctgaagaatgacgtgccactggccggaccactgatcgcaggaggcatgctgatcgcctgctatgtgatcagcggctctagcgccgatctgtccctggagaaggcagcagaggtgtcctgggaggaggaggcagagcacagcggagcctcccacaacatcctggtggaggtgcaggacgatggcaccatgaagatcaaggacgaggagcgggacgataccctgacaatcctgctgaaggccaccctgctggccatctctggcgtgtaccctatgagcatcccagccacactgttcgtgtggtatttctggcagaagaagaagcagcgcagcggcgtgctgtgggataccccttccccacctgaggtggagagggccgtgctggacgatggaatctacagaatcctgcagagaggcctgctgggcagaagccaggtcggagtgggcgtgtttcaggagggcgtgttccacacaatgtggcacgtgacccgcggcgccgtgctgatgtaccagggcaagcggctggagccatcttgggccagcgtgaagaaggacctgatcagctatggcggaggatggaggttccagggatcctggaacgcaggagaggaggtgcaggtcatcgcagtggagcccggcaagaatcctaagaacgtgcagaccgcccccggcacattcaagacccctgagggagaagtgggagcaatcgccctggacttcaagccaggcacatctggcagccccatcgtgaatagagagggcaagatcgtgggcctgtacggcaacggcgtggtgacaacctctggcacctatgtgagcgccatcgcacaggcaaaggcctcccaggagggacctctgccagagatcgaggacgaggtgtttcggaagagaaatctgacaatcatggatctgcaccctggctctggcaagaccaggcgctatctgccagcaatcgtgcgggaggcaatcaggagaaacgtgagaaccctggtgctggccccaacaagggtggtggcctccgagatggcagaggccctgaagggcatgcccatcagataccagacaaccgccgtgaagtctgagcacaccggcaaggagatcgtggacctgatgtgccacgccaccttcacaatgaggctgctgagcccagtgcgcgtgcccaactacaatatgatcatcatggacgaggcccactttaccgatcccgcctctatcgccgccagaggctatatcagcacaagagtgggcatgggcgaggctgccgccatcttcatgaccgcaacaccacccggctctgtggaggcctttccacagagcaatgccgtgatccaggacgaggagagggacatccccgagcggagctggaactctggctacgactggatcaccgatttccccggcaagacagtgtggtttgtgcctagcatcaagtccggcaatgacatcgccaactgcctgcggaagaatggcaagagagtggtgcagctgagccgcaagacattcgacaccgagtaccagaagaccaagaacaatgactgggattatgtggtgacaaccgacatctccgagatgggcgccaactttcgggcagacagagtgatcgatccccggcggtgcctgaagccagtgatcctgaaggatggacctgagagagtgatcctggcaggaccaatgcctgtgaccgtggccagcgccgcacagcggagaggcaggatcggccgcaaccagaataaggagggcgaccagtacatctatatgggccagccactgaacaatgacgaggatcacgcccactggacagaggccaagatgctgctggataacatcaatacccccgagggcatcatccctgccctgttcgagccagagagagagaagagcgccgcaatcgacggagagtacaggctgcgcggagaggccaggaagacctttgtggagctgatgaggaggggcgatctgcccgtgtggctgtcctacaaggtggcctctgagggcttccagtattccgaccggagatggtgctttgatggcgagagaaacaatcaggtgctggaggagaatatggacgtggagatttggaccaaggagggcgagaggaagaagctgcggcccagatggctggacgcacgcacatatagcgatcctctggccctgcgggagtttaaggagttcgcagcaggcaggcgctccgtgtctggcgacctgatcctggagatcggcaagctgccacagcacctgacccagcgcgcccagaatgccctggataacctggtcatgctgcacaactccgagcagggaggcaaggcctacaggcacgctatggaggagctgcctgacacaatcgagacactgatgctgctggccctgatcgccgtgctgacaggaggcgtgaccctgttctttctgtccggcagaggcctgggcaagacctctatcggcctgctgtgcgtgatcgcctcctctgccctgctgtggatggcctccgtggagccacactggatcgcagcctctatcatcctggagttctttctgatggtgctgctgatcccagagccagacaggcagcgcacccctcaggataatcagctagcctacgtggtcatcggcctgctgttcatgatcctgacagctgccgccaacgagatgggcctgctggagacaaccaagaaggacctgggcatcggacacgctgccgccgagaatcaccaccacgcagccatgctggacgtggatctgcaccctgccagcgcctggaccctgtacgcagtggcaacaaccatcatcaccccaatgatgaggcacacaatcgagaatacaaccgccaacatctccctgacagccatcgccaatcaggccgccatcctgatgggcctggataagggctggcctatctctaagatggacatcggcgtgccactgctggccctgggctgctacagccaggtgaacccactgaccctgacagccgccgtgttcatgctggtggcccactatgccatcatcggccccggcctgcaggcaaaggcaaccagggaggcacagaagcgcacagcagcaggcatcatgaagaacccaaccgtggacggcatcgtggccatcgacctggaccccgtggtgtacgatgccaagttcgagaagcagctgggccagatcatgctgctgatcctgtgcacctctcagatcctgctgatgcgcacaacctgggccctgtgcgagagcatcacactggccaccggaccactgacaaccctgtgggagggcagccctggcaagttttggaatacaaccatcgccgtgagcatggccaacatcttccgcggctcctatctggcaggagcaggcctggcctttagcctgatgaagtccctgggcggcggccggagaggcaccggcgcccagggcgagacactgggcgagaagtggaagcggcagctgaatcagctgagcaagtccgagttcaacacctacaagcggagcggcatcatcgaggtggaccggagcgaggcaaaggagggcctgaagagaggcgagccaaccaagcacgccgtgtctaggggcacagccaagctgcggtggtttgtggagagaaacctggtgaagcccgagggcaaagtgatcgacctgggctgcggccggggaggatggtcctactattgtgccggcctgaagaaggtgaccgaggtgaagggctacacaaagggaggccctggccacgaggagcctatcccaatggccacctacggctggaatctggtgaagctgtatagcggcaaggacgtgttctttacccctccagagaagtgcgacacactgctgtgcgacatcggcgagagcagccccaaccctaccatcgaggagggccggacactgagagtgctgaagatggtggagccctggctgagaggcaatcagttctgcatcaagatcctgaacccttacatgccaagcgtggtggagacactggagcagatgcagaggaagcacggcggcatgctggtgaggaatcccctgtctcgcaacagcacccacgagatgtattgggtgtcctgtggcacaggcaatatcgtgtccgccgtgaacatgacctctcggatgctgctgaatcggttcacaatggcccacaggaagcctacatacgagcgcgacgtggatctgggcgcaggcacccgccacgtggcagtggagccagaggtggccaacctggacatcatcggccagcggatcgagaatatcaagaacggccacaagtctacatggcactacgacgaggataatccttataagacctgggcctaccacggcagctatgaggtgaagccatctggcagcgcctctagcatggtgaacggcgtggtgagactgctgaccaagccctgggacgtgatccctatggtgacacagatcgccatgaccgatacaacccccttcggccagcagagggtgtttaaggagaaggtggacacccggacacctaaggccaagagaggcaccgcccagatcatggaggtgacagccagatggctgtggggcttcctgagcaggaataagaagccaaggatctgcacacgcgaggagttcaccaggaaggtgcgctccaacgcagcaatcggagccgtgtttgtggatgagaatcagtggaactctgccaaggaggccgtggaggacgagcggttctgggatctggtgcaccgggagagagagctgcacaagcagggcaagtgcgccacctgcgtgtataacatgatgggcaagcgggagaagaagctgggcgagtttggcaaggcaaagggctcccgcgccatctggtatatgtggctgggcgcccggtttctggagttcgaggccctgggcttcatgaatgaggaccactggttttctcgcgagaactccctgtctggagtggagggagagggcctgcacaagctgggctacatcctgcgggacatcagcaagatccctggcggcaatatgtatgcagacgataccgcaggatgggacacacgcatcaccgaggacgatctgcagaacgaggccaagatcacagacatcatggagcctgagcacgccctgctggccaccagcatcttcaagctgacatatcagaataaggtggtgcgggtgcagcggcccgcaaagaacggcaccgtgatggacgtgatctccaggcgcgatcagaggggctctggacaagtgggcacatacggcctgaataccttcacaaacatggaggcccagctgatcagacagatggagagcgagggcatctttagcccctccgagctggagacacctaacctggccgagagggtgctggactggctgaagaagcacggcacagagaggctgaagcgcatggccatctccggcgacgattgcgtggtgaagcccatcgacgatagattcgccacagccctgaccgccctgaatgacatgggcaaggtgaggaaggacatccctcagtgggagccatctaagggctggaacgattggcagcaggtgcccttttgcagccaccacttccaccagctgatcatgaaggacggccgggagatcgtggtgccttgtagaaatcaggatgagctggtgggaagggcccgcgtgagccagggagcaggctggtccctgcgggagacagcctgcctaggcaagtcctacgcccagatgtggcagctgatgtattttcacaggcgggacctgcggctggccgcaaacgccatctgttctgccgtgccagtggattgggtgcccaccagccggacaacctggtccatccacgcccaccaccagtggatgacaaccgaggacatgctgagcgtgtggaatagagtgtggatcgaggagaacccctggatggaggataagacccacgtgtcctcttgggaggacgtgccttatctgggcaagcgggaggatagatggtgtggctccctgatcggcctgacagccagggccacatgggcaaccaatatccaggtggccatcaaccaggtgaggcgcctgatcggcaacgagaattacctggattttatgacatctatgaagcggtttaagaacgagtccgacccagaaggagcactgtggtgagccaactcattcacaaaataaaggaaaataaaaaatcaaacaaggcaagaagtcaggccggattaagccatagcacggtaagagctatgctgcctgtgagccccgtccaaggacgtaaaatgaagtcaggccgaaagccacggttcgagcaagccgtgctgcctgtagctccatcgtggggatgtaaaaacccgggaggctgcaaaccatggaagctgtacgcatggggtagcagactagtggttagaggagacccctcccaagacacaacgcagcagcggggcccaacaccaggggaagctgtaccctggtggtaaggactagaggttagaggagaccccccgcacaacaacaaacagcatattgacgctgggagagaccagagatcctgctgtctctacagcatcattccaggcacagaacgccaaaaaatggaatggtgctgttgaatcaacaggttct

SEQ ID NO: 20 - DNA, 10179 bp, synthetic construct
  source 1..10179: mol_type = other DNA
atgaacaaccaacggaaaaagacgggtcgaccgtctttcaatatgctgaaacgcgcgagaaaccgcgtgtcaactgtgagccagctggccaagcggttctctaagggcctgctgagcggacagggaccaatgaagctggtcatggccttcatcgcctttctgagattcctggcaatcccacctaccgcaggcatcctggccagatggggcagcttcaagaagaacggcgccatcaaggtgctgagaggctttaagaaggagatcagcaacatgctgaatatcatgaaccggagaaagaggtctgtgaccatgctgctgatgctgctgcctacagccctggccttccacctgaccacacgcggcggagagccacacatgatcgtgtccaagcaggagcggggcaagtctctgctgtttaagaccagcgccggcgtgaatatgtgcacactgatcgctatggacctgggcgagctgtgcgaggatacaatgacctacaagtgtccaagaatcacagagacagagcccgacgatgtggactgctggtgtaacgccacagagacatgggtgacctatggcacatgttctcagaccggcgagcacaggcgcgataagagaagcgtggccctggcccctcacgtgggcctgggcctggagacaaggaccgagacatggatgagcagcgagggcgcctggaagcagatccagaaggtggagacatgggccctgaggcacccaggctttacagtgatcgccctgttcctggcacacgcaatcggcaccagcatcacacagaagggcatcatcttcatcctgctgatgctggtgacccccagcatggccatgagatgcgtgggcatcggcaaccgcgactttgtggagggcctgtctggagcaacctgggtggatgtggtgctggagcacggcagctgcgtgaccacaatggccaaggacaagcccaccctggacatcgagctgctgaagactgaggtgacaaatcctgccgtgctgcgcaagctgtgcatcgaggccaagatcagcaacaccacaaccgactctcggtgtccaacacagggagaggccaccctggtggaagagcaggacaccaatttcgtgtgccggcggaccttcgtggacagaggatggggaaacggatgtggcctgttcggcaagggctctctgatcacctgcgccaagtttaagtgcgtgacaaagctggagggcaagatcgtgcagtacgagaatctgaagtatagcgtgatcgtgaccgtgcacacaggcgaccagcaccaagtgggcaacgagacaaccgagcacggcacaaccgccaccatcacaccacaggcccccacatccgagatccagctgaccgactacggcgccctgacactggattgctctcctcgcacaggcctggatttcaatgagatggtgctgctgacaatggagaagaagagctggctggtgcacaagcagtggtttctggacctgccactgccttggaccagcggagccagcacatcccaggagacatggaaccggcaggatctgctggtgaccttcaagacagcccacgccaagaagcaggaggtggtggtgctgggctcccaggagggagcaatgcacaccgccctgacaggagccaccgagatccagacctctggcacaaccacaatcttcgccggccacctgaagtgcagacttaagatggacaagctgaccctgaagggcatgtcttacgtgatgtgcaccggcagctttaagctggagaaggaggtggccgagacacagcacggcaccgtgctggtgcaggtgaagtatgagggcaccgacgccccctgtaagatccctttctctagccaggatgagaagggcgtgacacagaatggcagactgatcaccgccaaccctatcgtgacagataaggagaagccagtgaatatcgaggccgagccaccctttggcgagtcctatatcgtggtgggagcaggagagaaggccctgaagctgtcttggttcaagaagggctcctctatcggcaagatgtttgaggcaaccgccaggggcgccaggaggatggccatcctgggcgacacagcctgggatttcggctccatcggcggcgtgtttacctctgtgggcaagctgatccaccagattttcggcacagcgtacggcgtgctgttttctggcgtgagctggaccatgaagatcggcatcggcatcctgctgacatggctgggcctgaactctaggagcacatccctgtctatgacctgcatcgccgtgggcatggtgaccctgtatctgggcgtgatggtgcaggcagacagcggatgcgtgatcaattggaagggcagagagctgaagtgtggctccggcatcttcgtgaccaacgaggtgcacacctggacagagcagtacaagtttcaggccgattcccccaagaggctgtctgccgcaatcggcaaggcctgggaggagggcgtgtgcggcatcaggtccgccacccgcctggagaatatcatgtggaagcagatcagcaatgagctgaaccacatcctgctggagaacgacatgaagttcacagtggtggtgggcgatgtgagcggcatcctggcacagggcaagaagatgatccgcccacagcctatggagcacaagtactcctggaagtcttggggcaaggccaagatcatcggcgccgatgtacagaataccaccttcatcatcgatggccctaacaccccagagtgccccgacaatcagcgggcctggaacatctgggaggtggaggactacggctttggcatcttcaccacaaatatctggctgaagctgagagactcctatacccaggtgtgcgatcacaggctgatgagcgccgccatcaaggactccaaggccgtgcacgccgatatgggctattggatcgagagcgagaagaacgagacatggaagctggccagagcctccttcatcgaggtgaagacctgcatctggcccaagagccacacactgtggtccaatggcgtgctggagagcgagatgatcatccctaaaatctacggcggcccaatctcccagcacaactacaggccaggctatttcacccagacagcaggaccctggcacctgggcaagctggagctggactttgatctgtgcgagggtaccacagtggtggtggacgagcactgtggcaatcggggccccagcctgagaaccacaaccgtgacaggcaagaccatccacgagtggtgctgtaggtcctgcaccctgcctccactgcgcttcaagggcgaggacggctgttggtacggcatggagatccgccctgtgaaggagaaggaggagaacctggtgaagagcatggtgtccgccggctctggagaggtggatagcttctccctgggcctgctgtgcatcagcatcatgatcgaggaagtgatgcggagcagatggtcccgcaagatgctgatgaccggcacactggccgtgtttctgctgctgacaatgggccagctgacctggaatgacctgatccggctgtgcatcatggtgggcgccaacgcctccgataagatgggcatgggcacaacctatctggccctgatggccacctttaggatgcgccctatgttcgccgtgggcctgctgtttcggagactgaccagccgggaggtgctgctgctgacagtgggcctgtccctggtggcctctgtggagctgccaaactccctggaggagctgggcgacgggctggcaatggggatcatgatgctgaagctgctgaccgatttccagtcccaccagctgtgggccacactgctgtctctgacctttgtgaagacaaccttcagcctgcactacgcctggaagacaatggccatgatcctgtctatcgtgagcctgttcccactgtgcctgtccacaacctctcagaagacaacctggctgccagtgctgctgggcagcctgggctgtaagcccctgacaatgtttctgatcaccgagaacaagatttggggaaggaagagctggcccctgaacgagggcatcatggccgtgggcatcgtgtccatcctgctgagcagcctgctgaagaatgacgtgccactggccggaccactgatcgcaggaggcatgctgatcgcctgctatgtgatcagcggctctagcgccgatctgtccctggagaaggcagcagaggtgtcctgggaggaggaggcagagcacagcggagcctcccacaacatcctggtggaggtgcaggacgatggcaccatgaagatcaaggacgaggagcgggacgataccctgacaatcctgctgaaggccaccctgctggccatctctggcgtgtaccctatgagcatcccagccacactgttcgtgtggtatttctggcagaagaagaagcagcgcagcggcgtgctgtgggataccccttccccacctgaggtggagagggccgtgctggacgatggaatctacagaatcctgcagagaggcctgctgggcagaagccaggtcggagtgggcgtgtttcaggagggcgtgttccacacaatgtggcacgtgacccgcggcgccgtgctgatgtaccagggcaagcggctggagccatcttgggccagcgtgaagaaggacctgatcagctatggcggaggatggaggttccagggatcctggaacgcaggagaggaggtgcaggtcatcgcagtggagcccggcaagaatcctaagaacgtgcagaccgcccccggcacattcaagacccctgagggagaagtgggagcaatcgccctggacttcaagccaggcacatctggcagccccatcgtgaatagagagggcaagatcgtgggcctgtacggcaacggcgtggtgacaacctctggcacctatgtgagcgccatcgcacaggcaaaggcctcccaggagggacctctgccagagatcgaggacgaggtgtttcggaagagaaatctgacaatcatggatctgcaccctggctctggcaagaccaggcgctatctgccagcaatcgtgcgggaggcaatcaggagaaacgtgagaaccctggtgctggccccaacaagggtggtggcctccgagatggcagaggccctgaagggcatgcccatcagataccagacaaccgccgtgaagtctgagcacaccggcaaggagatcgtggacctgatgtgccacgccaccttcacaatgaggctgctgagcccagtgcgcgtgcccaactacaatatgatcatcatggacgaggcccactttaccgatcccgcctctatcgccgccagaggctatatcagcacaagagtgggcatgggcgaggctgccgccatcttcatgaccgcaacaccacccggctctgtggaggcctttccacagagcaatgccgtgatccaggacgaggagagggacatccccgagcggagctggaactctggctacgactggatcaccgatttccccggcaagacagtgtggtttgtgcctagcatcaagtccggcaatgacatcgccaactgcctgcggaagaatggcaagagagtggtgcagctgagccgcaagacattcgacaccgagtaccagaagaccaagaacaatgactgggattatgtggtgacaaccgacatctccgagatgggcgccaactttcgggcagacagagtgatcgatccccggcggtgcctgaagccagtgatcctgaaggatggacctgagagagtgatcctggcaggaccaatgcctgtgaccgtggccagcgccgcacagcggagaggcaggatcggccgcaaccagaataaggagggcgaccagtacatctatatgggccagccactgaacaatgacgaggatcacgcccactggacagaggccaagatgctgctggataacatcaatacccccgagggcatcatccctgccctgttcgagccagagagagagaagagcgccgcaatcgacggagagtacaggctgcgcggagaggccaggaagacctttgtggagctgatgaggaggggcgatctgcccgtgtggctgtcctacaaggtggcctctgagggcttccagtattccgaccggagatggtgctttgatggcgagagaaacaatcaggtgctggaggagaatatggacgtggagatttggaccaaggagggcgagaggaagaagctgcggcccagatggctggacgcacgcacatatagcgatcctctggccctgcgggagtttaaggagttcgcagcaggcaggcgctccgtgtctggcgacctgatcctggagatcggcaagctgccacagcacctgacccagcgcgcccagaatgccctggataacctggtcatgctgcacaactccgagcagggaggcaaggcctacaggcacgctatggaggagctgcctgacacaatcgagacactgatgctgctggccctgatcgccgtgctgacaggaggcgtgaccctgttctttctgtccggcagaggcctgggcaagacctctatcggcctgctgtgcgtgatcgcctcctctgccctgctgtggatggcctccgtggagccacactggatcgcagcctctatcatcctggagttctttctgatggtgctgctgatcccagagccagacaggcagcgcacccctcaggataatcagctagcctacgtggtcatcggcctgctgttcatgatcctgacagctgccgccaacgagatgggcctgctggagacaaccaagaaggacctgggcatcggacacgctgccgccgagaatcaccaccacgcagccatgctggacgtggatctgcaccctgccagcgcctggaccctgtacgcagtggcaacaaccatcatcaccccaatgatgaggcacacaatcgagaatacaaccgccaacatctccctgacagccatcgccaatcaggccgccatcctgatgggcctggataagggctggcctatctctaagatggacatcggcgtgccactgctggccctgggctgctacagccaggtgaacccactgaccctgacagccgccgtgttcatgctggtggcccactatgccatcatcggccccggcctgcaggcaaaggcaaccagggaggcacagaagcgcacagcagcaggcatcatgaagaacccaaccgtggacggcatcgtggccatcgacctggaccccgtggtgtacgatgccaagttcgagaagcagctgggccagatcatgctgctgatcctgtgcacctctcagatcctgctgatgcgcacaacctgggccctgtgcgagagcatcacactggccaccggaccactgacaaccctgtgggagggcagccctggcaagttttggaatacaaccatcgccgtgagcatggccaacatcttccgcggctcctatctggcaggagcaggcctggcctttagcctgatgaagtccctgggcggcggccggagaggcaccggcgcccagggcgagacactgggcgagaagtggaagcggcagctgaatcagctgagcaagtccgagttcaacacctacaagcggagcggcatcatcgaggtggaccggagcgaggcaaaggagggcctgaagagaggcgagccaaccaagcacgccgtgtctaggggcacagccaagctgcggtggtttgtggagagaaacctggtgaagcccgagggcaaagtgatcgacctgggctgcggccggggaggatggtcctactattgtgccggcctgaagaaggtgaccgaggtgaagggctacacaaagggaggccctggccacgaggagcctatcccaatggccacctacggctggaatctggtgaagctgtatagcggcaaggacgtgttctttacccctccagagaagtgcgacacactgctgtgcgacatcggcgagagcagccccaaccctaccatcgaggagggccggacactgagagtgctgaagatggtggagccctggctgagaggcaatcagttctgcatcaagatcctgaacccttacatgccaagcgtggtggagacactggagcagatgcagaggaagcacggcggcatgctggtgaggaatcccctgtctcgcaacagcacccacgagatgtattgggtgtcctgtggcacaggcaatatcgtgtccgccgtgaacatgacctctcggatgctgctgaatcggttcacaatggcccacaggaagcctacatacgagcgcgacgtggatctgggcgcaggcacccgccacgtggcagtggagccagaggtggccaacctggacatcatcggccagcggatcgagaatatcaagaacggccacaagtctacatggcactacgacgaggataatccttataagacctgggcctaccacggcagctatgaggtgaagccatctggcagcgcctctagcatggtgaacggcgtggtgagactgctgaccaagccctgggacgtgatccctatggtgacacagatcgccatgaccgatacaacccccttcggccagcagagggtgtttaaggagaaggtggacacccggacacctaaggccaagagaggcaccgcccagatcatggaggtgacagccagatggctgtggggcttcctgagcaggaataagaagccaaggatctgcacacgcgaggagttcaccaggaaggtgcgctccaacgcagcaatcggagccgtgtttgtggatgagaatcagtggaactctgccaaggaggccgtggaggacgagcggttctgggatctggtgcaccgggagagagagctgcacaagcagggcaagtgcgccacctgcgtgtataacatgatgggcaagcgggagaagaagctgggcgagtttggcaaggcaaagggctcccgcgccatctggtatatgtggctgggcgcccggtttctggagttcgaggccctgggcttcatgaatgaggaccactggttttctcgcgagaactccctgtctggagtggagggagagggcctgcacaagctgggctacatcctgcgggacatcagcaagatccctggcggcaatatgtatgcagacgataccgcaggatgggacacacgcatcaccgaggacgatctgcagaacgaggccaagatcacagacatcatggagcctgagcacgccctgctggccaccagcatcttcaagctgacatatcagaataaggtggtgcgggtgcagcggcccgcaaagaacggcaccgtgatggacgtgatctccaggcgcgatcagaggggctctggacaagtgggcacatacggcctgaataccttcacaaacatggaggcccagctgatcagacagatggagagcgagggcatctttagcccctccgagctggagacacctaacctggccgagagggtgctggactggctgaagaagcacggcacagagaggctgaagcgcatggccatctccggcgacgattgcgtggtgaagcccatcgacgatagattcgccacagccctgaccgccctgaatgacatgggcaaggtgaggaaggacatccctcagtgggagccatctaagggctggaacgattggcagcaggtgcccttttgcagccaccacttccaccagctgatcatgaaggacggccgggagatcgtggtgccttgtagaaatcaggatgagctggtgggaagggcccgcgtgagccagggagcaggctggtccctgcgggagacagcctgcctaggcaagtcctacgcccagatgtggcagctgatgtattttcacaggcgggacctgcggctggccgcaaacgccatctgttctgccgtgccagtggattgggtgcccaccagccggacaacctggtccatccacgcccaccaccagtggatgacaaccgaggacatgctgagcgtgtggaatagagtgtggatcgaggagaacccctggatggaggataagacccacgtgtcctcttgggaggacgtgccttatctgggcaagcgggaggatagatggtgtggctccctgatcggcctgacagccagggccacatgggcaaccaatatccaggtggccatcaaccaggtgaggcgcctgatcggcaacgagaattacctggattttatgacatctatgaagcggtttaagaacgagtccgacccagaaggagcactgtggtga

SEQ ID NO: 21 - DNA, 10707 bp, synthetic construct
  source 1..10707: mol_type = other DNA
agttgttagtctacgtggaccgacaagaacagtttcgactcggaagcttgcttaacgtagtgctgacagttttttattagagagcagatttctgatgaacaaccaacgaaaaaagacgggaaaaccgtctatcaatatgctgaaacgcgtgagaaaccgtgtgtcaactggatcacagttggcgaagagattctcaagaggattgctgaacggccaaggaccaatgaaattggttatggcgttcatagctttcctcagatttctagccattccaccaacagcaggagtcttggctagatggggaaccttcaagaagtcaggggctattaaggtcctaaaaggcttcaagaaggagatttcaaacatgctgagcattatcaacaaaaggaaaaagacatcgctctgtctcatgatgatgttaccagcaacacttgctttccacttgacttcacgcgatggagagccgcgcatgattgtggggaagaatgaaagagggaaatccctactttttaagacagcttctggaatcaacatgtgcacactcatagctatggacttgggagagatgtgtgatgacacggtcacttataaatgccccctcattgccgaagtggaacctgaagacattgactgctggtgcaaccttacatcgacatgggtgacttatggaacgtgcaatcaagctggggagcacagacgcgacaagagatcagtggcgttagctccccatgtcggcatgggactggacacacgtacccaaacctggatgtcggctgaaggagcttggagacaagtcgagaaggtagagacatgggctcttaggcacccaggtttcaccatactagctctatttcttgcccattacataggcacttccctgacccagaaagtggttatttttatactactaatgctggtcactccatccatgacaatgagatgcgtgggagtaggaaacagagattttgtggaaggtctgtcaggagctacgtgggttgatgtggtgctcgagcacggtgggtgtgtgaccaccatggctaagaacaagcctacgctggacatagagcttcagaagaccgaggccacccaactggcgaccctaaggaagttatgcattgagggaaaaattaccaacataacaactggctcaaggtgtcctacccagggggaagcgattttacctgaggagcaggaccagaactacgtatgtaagcacacatacgtggatagaggttggggaaacggttgtggtttgtttggaaaaggaagcttggtgacatgcgcgaaatttcaatgtctagaaccaatagagggaaaagtggtgcaatatgagaacctcaaatacactgtcatcatcacagtgcacacaggagaccaaccccaggtgggaaatgacacgcagggagtcacggttgagataacaccccaggcatcaaccgttgaagctgtcttgcttgaatatggaacccttgggctaaaatgctcaccacggacaggcttggatttcaatgaaatgattttattgacaatgaagaccaaagcctggatggtacataggcaatggttctttgacctacccctaccatggacatcaggagctacaacagagacaccaacttggaacaggaaagagcttcttgtaacattcaaaaatgcacatgcgaaaaagcaagaagtagttgtccttggatcacaagagggagcaatgcacacagcgctgacaggagctacagagattcaaaactcaggaggtacaagcatttttgcggggcacttgaaatgtagacttaagatggacaaattggaactcaaggggatgagctatgcaatgtgcttgaatacctttgtgttgaagaaagaagtctccgaaacgcagcatgggacaatactcattaaggttgagtacaaaggggaagatgcaccttgcaagattcctttctccacagaggatggacaagggaaagcccacaatggtagactgatcacagccaacccagtggtgaccaagaaggaggagcctgtcaacattgaggctgaacctccttttggggaaagcaacatagtgattggaattggagacaaagccttgaaaattaactggtacaagaagggaagctcgattgggaagatgttcgaggccactgccagaggtgcaaggcgcatggccatcttgggagacacagcctgggactttggttcagtgggtggtgttctaaattcattagggaaaatggtgcaccaaatattcggaagtgcttacacagccctgtttagcggagtctcatggataatgaaaattggaataggtgtcctcttaacctggatagggctgaattcaaaaaacacttccatgtcattttcatgcattgtgataggaattattacactctatctgggagccgtggtacaagctgacatggggtgtgtcataaactggaaaggaaaagaactcaaatgtggaagtggaattttcgtcactaatgaggtccacacctggacagagcaatacaaatttcaagcagactcccctaaaagactggcgacagccatcgcaggcgcttgggaaaatggagtctgtggaatcaggtcaacaaccagaatggagaatctattgtggaagcaaatagccaatgagctgaactacatattatgggaaaacaacatcaaattaacggtagttgtgggcgacataattggggtcttagagcaagggaaaagaacactaacaccacagcccatggagctaaaatattcatggaaaacatggggaaaggcaaaaatagtgacagctgaaacacaaaattcctctttcataatagatgggccaaacacaccggagtgtccaagtgcctcaagagcatggaatgtgtgggaggtggaagattacgggtttggagtcttcacaaccaacatatggctgaaactccgagaggtgtacacccaatcatgtgaccataggctaatgtcggcagccatcaaagatgagagggccgtgcatgccgacatgggctattggatagaaagccaaaagaatggaagttggaagctagaaaaagcatccttcatagaggtgaaaacctgtacttggccaaaatcacacactctttggagcaatggtgtactagagagtgacatgatcatcccaaagagtctagctggtcctatttcacaacacaaccacaggcccgggtaccacacccaaacggcaggaccttggcacttgggaaaattggagctggacttcaactattgtgaaggaacaacagtagtcatcacagaaaactgtgggacaagaggcccatcattgagaacaacaacagtgtcagggaagctgatacacgaatggtgttgccgctcgtgcacacttcctcccttgcgatacatgggagaggacggctgctggtatggcatggaaattagacctatcaatgagaaagaagagaacatggtaaaatctttagtctcagcagggagtggaaaagtggacaacttcacaatgggagtcctgtgtttggcaatcctcttcgaagaggtgatgagaggaaaatttgggaaaaaacacatgattgcaggggttctcttcacgtttgtgctccttctctcagggcaaataacatggagagatatggcacacacactcataatgattgggtccaacgcttctgacaggatgggaatgggcgttacctacctagctttaattgcaacattcaaaatccagccattcttggctttgggattcttcctgaggaaattgacatctagagaaaatttgctgttgggagttgggttggccatggcaacaacgttacaactgccagaggacattgaacaaatggcgaatggaattgctctggggctcatgactctaaaactgataacacaatttgagacatatcagttgtggacggcattagtctccttaacatgttcaaacacaattttcacgttgactgttgcctggagaacagccaccttgattctggccggagtttcgcttttgccactgtgccagtcttcgagcatgaggaaaacagattggctcccaatgactgtggcagctatgggagttccacccttaccactttttatcttcagcttgaaggacacacccaaaaggaggagctggccactgaatgagggagtgatggctgttgggcttgtgagcattctagctagttctctccttaggaatgatgtgcccatggctggaccactagtggccgggggcttgttgatagcgtgctatgtcataactggcacgtcagcagacctcactgtagaaaaagcagcagatgtaacatgggaggaagaggctgagcaaacaggagtgtcccacaatttgatgatcacagttgatgatgatggaacaatgagaataaaggatgatgagactgagaacatcctaacagtgctcttaaaaacagcattactaatagtatcaggcatctttccatactccatacccgccacactgttggtctggcatacttggcaaaagcaaacccaaagatctggcgttctatgggatgtacccagccccccagaaacacagaaagcagaactggaagagggggtctataggatcaaacaacaaggcatttttgggaaaacccaagtgggggttggagtgcagaaagaaggagtcttccacaccatgtggcacgtcacaagaggggcagtgttgacgcacaatgggaaaagactggaaccaaactgggccagcgtgaaaaaagatctgatttcatacggaggaggatggagattgagcgcacaatggcaaaagggagaggaggtgcaggttattgccgtagagcctgggaagaacccaaaaaactttcaaaccatgccgggcatttttcagacaacaacgggggaaataggagcaattgcactagacttcaagcctggaacttcaggatctcctatcataaacagagagggaaaggtagtaggactgtatggcaatggagtggttacaaaaaatggtggctacgtcagtggaatagcgcaaacaaatgcagaaccagacggaccgacaccggaattggaagaagaaatgttcaaaaagcgaaatctaaccataatggatcttcatcctgggtcaggaaagacgcggaaatatcttccagccatcgtcagagaagcaatcaagagacgcttaagaactctaattttggcaccaacaagagtggttgcagctgaaatggaagaagcactgaaaggactcccaataaggtatcaaacaactgcaacaaaatctgaacacacaggaagggagattgttgatctaatgtgccacgcaacattcacaatgcgcttgctatcaccagtcagggttccaaattacaatttgataataatggatgaggcccatttcacagatccagccagtatagcggctagagggtacatatcaactcgtgtaggaatgggagaggcagctgcaattttcatgacagcaacaccccctggaactgctgaagcctttccccagagcaacgctccaattcaagatgaagaaagggatattccggaacgctcatggaattcaggcaatgaatggattaccgactttgttgggaagacggtgtggtttgtccctagcatcaaagccggaaatgacatagcaaactgcctgcgaaaaaatggaaaaaaggtcatccaacttagtaggaagacttttgatacagaatatcagaagaccagactgaatgattgggacttcctggtgacaacagacatttcagaaatgggagctaactttaaagcagatagagtgattgacccaagaagatgtctcaagccagtaattttgacagatggacccgagcgagtgatcctggctggaccaatgccagtcaccgcagcgagcgctgcgcaaaggagagggagagttggcaggaacccacaaaaagaaaatgaccagtacatattcacgggccagcctctcaacaatgacgaagaccatgctcactggacagaagcaaaaatgctgctagacaacatcaacacaccagaagggatcataccagctctctttgaaccagagagggagaagtcagccgctatagacggtgaataccgcctgaagggtgagtccaggaagaccttcgtggaactcatgaggaggggtgacctcccagtttggctagcccataaagtagcctcagaagggatcaaatacacagatagaaaatggtgctttgatggagaacgtaataatcaaattttagaggagaacatggatgtggaaatctggacaaaggaaggagaaaggaaaaaattgagacctaggtggcttgatgcccgcacttattcagatcccttagcactcaaggaattcaaggattttgcagctggcagaaagtcaatcgcccttgatcttgtgacagaaataggaagagtgccttcacacttagcccacagaacgagaaacgccctggacaatttggtgatgctgcacacgtcagaacatggcggtagggcctacaggcatgcagtggaggaactaccagaaacaatggaaacactcctactcttgggactcatgatcttattaacaggtggagcaatgcttttcttgatatcaggtaaagggattggaaagacttcaataggactcatttgtgttattgtttccagtggcatgttatggatggctgatgtcccacttcaatggatcgcgtcggctatagtcctggaatttttcatgatggtgttgctcataccagaaccagaaaaacaaagaactccccaagacaaccaactcgcatatgtcgtgataggcatacttacactggctgcgatagtagcagctaatgaaatgggattactggaaactacaaagagagatttaggaatgtctaaagaaccaggtgttgtttctccaaccagctatttagatgtagacttgcacccagcatcagcctggacattgtacgccgtggccacaacagtaataacaccaatgttgagacataccatagagaattccacagcaaatgtgtccctggcagccatagctaaccaggcagtggtcctgatgggtttagacaaaggatggccaatatcgaaaatggacctaggcgtaccgctactggcactgggctgctattcacaagtgaacccactgactctcacagcggcagtacttctgctagtcacacattatgccattataggtccaggattgcaggctaaagccactcgtgaagctcaaaaaagaacagctgctggaataatgaagaatccaacggtggatgggataatgacaatagacctagatcctgtaatatacgattcaaaattcgaaaagcaactaggacaggtcatgctcctggttctgtgtgcagttcaacttttgttaatgagaacatcatgggccttgtgtgaagctctaaccctagccacaggaccaataacaacactctgggaaggatcacctggaaagttttggaacaccacgatagctgtttccatggctaacatctttagagggagctacttagcaggaactgggcttgctttttctatcatgaaatcagttggaacaggaaggagaggaacggggtcacaaggcgaaaccttaggagaaaagtggaaaaagaaattaaatcagttatcccggaaagagtttgacctttacaagaaatctggaatcactgaagtggatagaacagaagccaaagaagggttgaaaagaggagaaacaacacatcatgccgtgtccagaggcagcgcaaaacttcaatggttcgtggagaggaacatggtcattcccgaaggaagagtcatagacttaggctgtggaagaggaggctggtcatattactgcgcaggactgaaaaaagttacagaagtgcgaggatacacaaaaggcggcccaggacacgaagaaccagtacctatgtctacatacggatggaacatagtcaagttaatgagtggaaaggacgtgttttatcttccacctgaaaagtgtgacaccctattgtgtgacattggagaatcttcaccaagcccaacagtggaagaaagcagaactataagagttttgaagatggttgagccatggctaaaaaacaaccagttttgcattaaagtattaaacccttacatgccaactgtgattgagcacctagaaagactacaaagaaaatatggaggaatgcttgtgagaaacccactctcacgaaactccacgcatgaaatgtactggatatccaatggtaccggcaacattgtctcttcagtcaacatggtatccagattgctactgaacagatttacgatgacacacaggagacccaccatagagaaagatgtggatttgggagcaggaactcgacatgtcaatgcggaaccagaaacacccaacatggacgtcattggagaaagaataaaaaggatcaaggaggagcatagttcaacatggcactatgatgatgaaaatccttacaaaacgtgggcttaccatggatcctatgaagtcaaagccacaggctcagcctcctccatgataaatggagtcgtgaaactcctcacaaaaccatgggatgtggttcccatggtgacacagatggcaatgacagacacaactccatttgggcagcaaagagttttcaaagagaaagtggacaccaggacacccaggcccatgccagggacaagaaaggttatggagattacagcggaatggctttggagaaccctgggaaggaacaaaaaacccagattgtgcacaagggaagagttcacaaaaaaggtcagaaccaacgcggctatgggagctgttttcacagaggagaaccaatgggatagtgcgagagctgctgttgaggacgaggaattctggaaacttgtggacagagaacgtgaactccacaaattgggcaagtgtggaagctgcgtctacaacatgatgggcaagagagagaagaaacttggagagtttggcaaagcaaaaggcagtagagctatatggtacatgtggttgggagccaggtaccttgagttcgaagcactcggatttttaaatgaagaccactggttctcgcgtgaaaactcttacagtggagtagaaggagaaggactgcacaagctgggatacattttaagagacatttctaagatacccggaggagccatgtatgctgatgacacagctggttgggacacaagaataacagaagatgacctgcacaatgaggaaaaaatcacacagcaaatggaccctgaacacagacaattagcgaacgccatatttaagctcacataccaaaacaaagtggtcaaagtccaacgaccaactccaaaaggcacggtaatggacatcatatctaggaaagaccaaagaggcagtggacaggtggggacttatggtctgaacacattcaccaacatggaagcccagttagtcagacagatggaaggagaaggcgtgttgtcgaaggcagacctcgagaaccctcatctgctagagaagaaaatcacacaatggttggaaaccaaaggagtggagagattaaaaagaatggccatcagcggggatgattgcgtggtgaaaccgatcgatgacaggtttgccaatgccctgcttgccctgaacgacatgggaaaggttaggaaggacatacctcaatggcagccatcaaaggggtggcatgattggcaacaggtccctttctgctcccaccactttcatgaactgatcatgaaagatggaagaaagttggtggttccctgcagaccccaggacgaactaataggaagggcgagaatttctcaaggagcaggatggagccttaaagaaactgcatgtctagggaaagcctacgctcaaatgtggagtctcatgtattttcacagaagagatcttagactagcatccaacgccatttgttcagcagtaccagtccattgggtccctacaagcagaacgacatggtctattcacgctcaccatcagtggatgactacagaagacatgcttactgtctggaacagggtgtggatagaggacaatccatggatggaagacaaaactccagtcacaacttgggaagatgttccatacctagggaagagagaagatcaatggtgcggatcactcattggtctcacttccagagcaacctgggcccagaacatactcacagcaatccaacaggtgagaagccttataggcgatgaagaatttctggactacatgccttcgatgaagagattcaggaaggaggaggagtcagagggagccatttggtaaacaaaggaagtaaaaaagagacaaactgtcaggccaccttaagccacagtacggaagaagctgtgcagcctgtgagccccgtccaaggacgttaaaagaagaagtcaggcccaaaagccacggcttgagcaaaccgtgctgcctgtagctccgtcgtggggacgtaaagcctgggaggctgcaaaccgtggaagctgtacgcacggtgtagcagactagcggttagaggagacccctcccatgacacaacgcagcagcggggcccgagcactgagggaagctgtacctccttgcaaaggactagaggttagaggagaccccccgcaaataaaaacagcatattgacgctgggagagaccagagatcctgctgtctcctcagcatcattccaggcacagaacgccagaaaatggaatggtgctgttgaatcaacaggttct

SEQ ID NO: 22 - DNA, 10173 bp, synthetic construct
  source 1..10173: mol_type = other DNA
atgaacaaccaacgaaaaaagacgggaaaaccgtctatcaatatgctgaaacgcgtgagaaaccgtgtgtcaactggatcacagttggcgaagagattctcaagaggattgctgaacggccaaggaccaatgaaattggttatggcgttcatagctttcctcagatttctagccattccaccaacagcaggagtcttggctagatggggaaccttcaagaagtcaggggctattaaggtcctaaaaggcttcaagaaggagatttcaaacatgctgagcattatcaacaaaaggaaaaagacatcgctctgtctcatgatgatgttaccagcaacacttgctttccacttgacttcacgcgatggagagccgcgcatgattgtggggaagaatgaaagagggaaatccctactttttaagacagcttctggaatcaacatgtgcacactcatagctatggacttgggagagatgtgtgatgacacggtcacttataaatgccccctcattgccgaagtggaacctgaagacattgactgctggtgcaaccttacatcgacatgggtgacttatggaacgtgcaatcaagctggggagcacagacgcgacaagagatcagtggcgttagctccccatgtcggcatgggactggacacacgtacccaaacctggatgtcggctgaaggagcttggagacaagtcgagaaggtagagacatgggctcttaggcacccaggtttcaccatactagctctatttcttgcccattacataggcacttccctgacccagaaagtggttatttttatactactaatgctggtcactccatccatgacaatgagatgcgtgggagtaggaaacagagattttgtggaaggtctgtcaggagctacgtgggttgatgtggtgctcgagcacggtgggtgtgtgaccaccatggctaagaacaagcctacgctggacatagagcttcagaagaccgaggccacccaactggcgaccctaaggaagttatgcattgagggaaaaattaccaacataacaactggctcaaggtgtcctacccagggggaagcgattttacctgaggagcaggaccagaactacgtatgtaagcacacatacgtggatagaggttggggaaacggttgtggtttgtttggaaaaggaagcttggtgacatgcgcgaaatttcaatgtctagaaccaatagagggaaaagtggtgcaatatgagaacctcaaatacactgtcatcatcacagtgcacacaggagaccaaccccaggtgggaaatgacacgcagggagtcacggttgagataacaccccaggcatcaaccgttgaagctgtcttgcttgaatatggaacccttgggctaaaatgctcaccacggacaggcttggatttcaatgaaatgattttattgacaatgaagaccaaagcctggatggtacataggcaatggttctttgacctacccctaccatggacatcaggagctacaacagagacaccaacttggaacaggaaagagcttcttgtaacattcaaaaatgcacatgcgaaaaagcaagaagtagttgtccttggatcacaagagggagcaatgcacacagcgctgacaggagctacagagattcaaaactcaggaggtacaagcatttttgcggggcacttgaaatgtagacttaagatggacaaattggaactcaaggggatgagctatgcaatgtgcttgaatacctttgtgttgaagaaagaagtctccgaaacgcagcatgggacaatactcattaaggttgagtacaaaggggaagatgcaccttgcaagattcctttctccacagaggatggacaagggaaagcccacaatggtagactgatcacagccaacccagtggtgaccaagaaggaggagcctgtcaacattgaggctgaacctccttttggggaaagcaacatagtgattggaattggagacaaagccttgaaaattaactggtacaagaagggaagctcgattgggaagatgttcgaggccactgccagaggtgcaaggcgcatggccatcttgggagacacagcctgggactttggttcagtgggtggtgttctaaattcattagggaaaatggtgcaccaaatattcggaagtgcttacacagccctgtttagcggagtctcatggataatgaaaattggaataggtgtcctcttaacctggatagggctgaattcaaaaaacacttccatgtcattttcatgcattgtgataggaattattacactctatctgggagccgtggtacaagctgacatggggtgtgtcataaactggaaaggaaaagaactcaaatgtggaagtggaattttcgtcactaatgaggtccacacctggacagagcaatacaaatttcaagcagactcccctaaaagactggcgacagccatcgcaggcgcttgggaaaatggagtctgtggaatcaggtcaacaaccagaatggagaatctattgtggaagcaaatagccaatgagctgaactacatattatgggaaaacaacatcaaattaacggtagttgtgggcgacataattggggtcttagagcaagggaaaagaacactaacaccacagcccatggagctaaaatattcatggaaaacatggggaaaggcaaaaatagtgacagctgaaacacaaaattcctctttcataatagatgggccaaacacaccggagtgtccaagtgcctcaagagcatggaatgtgtgggaggtggaagattacgggtttggagtcttcacaaccaacatatggctgaaactccgagaggtgtacacccaatcatgtgaccataggctaatgtcggcagccatcaaagatgagagggccgtgcatgccgacatgggctattggatagaaagccaaaagaatggaagttggaagctagaaaaagcatccttcatagaggtgaaaacctgtacttggccaaaatcacacactctttggagcaatggtgtactagagagtgacatgatcatcccaaagagtctagctggtcctatttcacaacacaaccacaggcccgggtaccacacccaaacggcaggaccttggcacttgggaaaattggagctggacttcaactattgtgaaggaacaacagtagtcatcacagaaaactgtgggacaagaggcccatcattgagaacaacaacagtgtcagggaagctgatacacgaatggtgttgccgctcgtgcacacttcctcccttgcgatacatgggagaggacggctgctggtatggcatggaaattagacctatcaatgagaaagaagagaacatggtaaaatctttagtctcagcagggagtggaaaagtggacaacttcacaatgggagtcctgtgtttggcaatcctcttcgaagaggtgatgagaggaaaatttgggaaaaaacacatgattgcaggggttctcttcacgtttgtgctccttctctcagggcaaataacatggagagatatggcacacacactcataatgattgggtccaacgcttctgacaggatgggaatgggcgttacctacctagctttaattgcaacattcaaaatccagccattcttggctttgggattcttcctgaggaaattgacatctagagaaaatttgctgttgggagttgggttggccatggcaacaacgttacaactgccagaggacattgaacaaatggcgaatggaattgctctggggctcatgactctaaaactgataacacaatttgagacatatcagttgtggacggcattagtctccttaacatgttcaaacacaattttcacgttgactgttgcctggagaacagccaccttgattctggccggagtttcgcttttgccactgtgccagtcttcgagcatgaggaaaacagattggctcccaatgactgtggcagctatgggagttccacccttaccactttttatcttcagcttgaaggacacacccaaaaggaggagctggccactgaatgagggagtgatggctgttgggcttgtgagcattctagctagttctctccttaggaatgatgtgcccatggctggaccactagtggccgggggcttgttgatagcgtgctatgtcataactggcacgtcagcagacctcactgtagaaaaagcagcagatgtaacatgggaggaagaggctgagcaaacaggagtgtcccacaatttgatgatcacagttgatgatgatggaacaatgagaataaaggatgatgagactgagaacatcctaacagtgctcttaaaaacagcattactaatagtatcaggcatctttccatactccatacccgccacactgttggtctggcatacttggcaaaagcaaacccaaagatctggcgttctatgggatgtacccagccccccagaaacacagaaagcagaactggaagagggggtctataggatcaaacaacaaggcatttttgggaaaacccaagtgggggttggagtgcagaaagaaggagtcttccacaccatgtggcacgtcacaagaggggcagtgttgacgcacaatgggaaaagactggaaccaaactgggccagcgtgaaaaaagatctgatttcatacggaggaggatggagattgagcgcacaatggcaaaagggagaggaggtgcaggttattgccgtagagcctgggaagaacccaaaaaactttcaaaccatgccgggcatttttcagacaacaacgggggaaataggagcaattgcactagacttcaagcctggaacttcaggatctcctatcataaacagagagggaaaggtagtaggactgtatggcaatggagtggttacaaaaaatggtggctacgtcagtggaatagcgcaaacaaatgcagaaccagacggaccgacaccggaattggaagaagaaatgttcaaaaagcgaaatctaaccataatggatcttcatcctgggtcaggaaagacgcggaaatatcttccagccatcgtcagagaagcaatcaagagacgcttaagaactctaattttggcaccaacaagagtggttgcagctgaaatggaagaagcactgaaaggactcccaataaggtatcaaacaactgcaacaaaatctgaacacacaggaagggagattgttgatctaatgtgccacgcaacattcacaatgcgcttgctatcaccagtcagggttccaaattacaatttgataataatggatgaggcccatttcacagatccagccagtatagcggctagagggtacatatcaactcgtgtaggaatgggagaggcagctgcaattttcatgacagcaacaccccctggaactgctgaagcctttccccagagcaacgctccaattcaagatgaagaaagggatattccggaacgctcatggaattcaggcaatgaatggattaccgactttgttgggaagacggtgtggtttgtccctagcatcaaagccggaaatgacatagcaaactgcctgcgaaaaaatggaaaaaaggtcatccaacttagtaggaagacttttgatacagaatatcagaagaccagactgaatgattgggacttcctggtgacaacagacatttcagaaatgggagctaactttaaagcagatagagtgattgacccaagaagatgtctcaagccagtaattttgacagatggacccgagcgagtgatcctggctggaccaatgccagtcaccgcagcgagcgctgcgcaaaggagagggagagttggcaggaacccacaaaaagaaaatgaccagtacatattcacgggccagcctctcaacaatgacgaagaccatgctcactggacagaagcaaaaatgctgctagacaacatcaacacaccagaagggatcataccagctctctttgaaccagagagggagaagtcagccgctatagacggtgaataccgcctgaagggtgagtccaggaagaccttcgtggaactcatgaggaggggtgacctcccagtttggctagcccataaagtagcctcagaagggatcaaatacacagatagaaaatggtgctttgatggagaacgtaataatcaaattttagaggagaacatggatgtggaaatctggacaaaggaaggagaaaggaaaaaattgagacctaggtggcttgatgcccgcacttattcagatcccttagcactcaaggaattcaaggattttgcagctggcagaaagtcaatcgcccttgatcttgtgacagaaataggaagagtgccttcacacttagcccacagaacgagaaacgccctggacaatttggtgatgctgcacacgtcagaacatggcggtagggcctacaggcatgcagtggaggaactaccagaaacaatggaaacactcctactcttgggactcatgatcttattaacaggtggagcaatgcttttcttgatatcaggtaaagggattggaaagacttcaataggactcatttgtgttattgtttccagtggcatgttatggatggctgatgtcccacttcaatggatcgcgtcggctatagtcctggaatttttcatgatggtgttgctcataccagaaccagaaaaacaaagaactccccaagacaaccaactcgcatatgtcgtgataggcatacttacactggctgcgatagtagcagctaatgaaatgggattactggaaactacaaagagagatttaggaatgtctaaagaaccaggtgttgtttctccaaccagctatttagatgtagacttgcacccagcatcagcctggacattgtacgccgtggccacaacagtaataacaccaatgttgagacataccatagagaattccacagcaaatgtgtccctggcagccatagctaaccaggcagtggtcctgatgggtttagacaaaggatggccaatatcgaaaatggacctaggcgtaccgctactggcactgggctgctattcacaagtgaacccactgactctcacagcggcagtacttctgctagtcacacattatgccattataggtccaggattgcaggctaaagccactcgtgaagctcaaaaaagaacagctgctggaataatgaagaatccaacggtggatgggataatgacaatagacctagatcctgtaatatacgattcaaaattcgaaaagcaactaggacaggtcatgctcctggttctgtgtgcagttcaacttttgttaatgagaacatcatgggccttgtgtgaagctctaaccctagccacaggaccaataacaacactctgggaaggatcacctggaaagttttggaacaccacgatagctgtttccatggctaacatctttagagggagctacttagcaggaactgggcttgctttttctatcatgaaatcagttggaacaggaaggagaggaacggggtcacaaggcgaaaccttaggagaaaagtggaaaaagaaattaaatcagttatcccggaaagagtttgacctttacaagaaatctggaatcactgaagtggatagaacagaagccaaagaagggttgaaaagaggagaaacaacacatcatgccgtgtccagaggcagcgcaaaacttcaatggttcgtggagaggaacatggtcattcccgaaggaagagtcatagacttaggctgtggaagaggaggctggtcatattactgcgcaggactgaaaaaagttacagaagtgcgaggatacacaaaaggcggcccaggacacgaagaaccagtacctatgtctacatacggatggaacatagtcaagttaatgagtggaaaggacgtgttttatcttccacctgaaaagtgtgacaccctattgtgtgacattggagaatcttcaccaagcccaacagtggaagaaagcagaactataagagttttgaagatggttgagccatggctaaaaaacaaccagttttgcattaaagtattaaacccttacatgccaactgtgattgagcacctagaaagactacaaagaaaatatggaggaatgcttgtgagaaacccactctcacgaaactccacgcatgaaatgtactggatatccaatggtaccggcaacattgtctcttcagtcaacatggtatccagattgctactgaacagatttacgatgacacacaggagacccaccatagagaaagatgtggatttgggagcaggaactcgacatgtcaatgcggaaccagaaacacccaacatggacgtcattggagaaagaataaaaaggatcaaggaggagcatagttcaacatggcactatgatgatgaaaatccttacaaaacgtgggcttaccatggatcctatgaagtcaaagccacaggctcagcctcctccatgataaatggagtcgtgaaactcctcacaaaaccatgggatgtggttcccatggtgacacagatggcaatgacagacacaactccatttgggcagcaaagagttttcaaagagaaagtggacaccaggacacccaggcccatgccagggacaagaaaggttatggagattacagcggaatggctttggagaaccctgggaaggaacaaaaaacccagattgtgcacaagggaagagttcacaaaaaaggtcagaaccaacgcggctatgggagctgttttcacagaggagaaccaatgggatagtgcgagagctgctgttgaggacgaggaattctggaaacttgtggacagagaacgtgaactccacaaattgggcaagtgtggaagctgcgtctacaacatgatgggcaagagagagaagaaacttggagagtttggcaaagcaaaaggcagtagagctatatggtacatgtggttgggagccaggtaccttgagttcgaagcactcggatttttaaatgaagaccactggttctcgcgtgaaaactcttacagtggagtagaaggagaaggactgcacaagctgggatacattttaagagacatttctaagatacccggaggagccatgtatgctgatgacacagctggttgggacacaagaataacagaagatgacctgcacaatgaggaaaaaatcacacagcaaatggaccctgaacacagacaattagcgaacgccatatttaagctcacataccaaaacaaagtggtcaaagtccaacgaccaactccaaaaggcacggtaatggacatcatatctaggaaagaccaaagaggcagtggacaggtggggacttatggtctgaacacattcaccaacatggaagcccagttagtcagacagatggaaggagaaggcgtgttgtcgaaggcagacctcgagaaccctcatctgctagagaagaaaatcacacaatggttggaaaccaaaggagtggagagattaaaaagaatggccatcagcggggatgattgcgtggtgaaaccgatcgatgacaggtttgccaatgccctgcttgccctgaacgacatgggaaaggttaggaaggacatacctcaatggcagccatcaaaggggtggcatgattggcaacaggtccctttctgctcccaccactttcatgaactgatcatgaaagatggaagaaagttggtggttccctgcagaccccaggacgaactaataggaagggcgagaatttctcaaggagcaggatggagccttaaagaaactgcatgtctagggaaagcctacgctcaaatgtggagtctcatgtattttcacagaagagatcttagactagcatccaacgccatttgttcagcagtaccagtccattgggtccctacaagcagaacgacatggtctattcacgctcaccatcagtggatgactacagaagacatgcttactgtctggaacagggtgtggatagaggacaatccatggatggaagacaaaactccagtcacaacttgggaagatgttccatacctagggaagagagaagatcaatggtgcggatcactcattggtctcacttccagagcaacctgggcccagaacatactcacagcaatccaacaggtgagaagccttataggcgatgaagaatttctggactacatgccttcgatgaagagattcaggaaggaggaggagtcagagggagccatttggtaa

SEQ ID NO: 23 - DNA, 10707 bp, synthetic construct
  source 1..10707: mol_type = other DNA
agttgttagtctacgtggaccgacaagaacagtttcgactcggaagcttgcttaacgtagtgctgacagttttttattagagagcagatttctgatgaacaaccaacgaaaaaagacgggaaaaccgtctatcaatatgctgaaacgcgtgagaaaccgtgtgtcaactggctcacagctggccaagcggttctccagaggcctgctgaacggacagggacccatgaagctggtcatggccttcatcgcctttctgcgcttcctggcaatcccacctacagcaggcgtgctggccagatggggcacctttaagaagagcggcgccatcaaggtgctgaagggcttcaagaaggagatctccaacatgctgtctatcatcaataagcgcaagaagaccagcctgtgcctgatgatgatgctgcctgccacactggcctttcacctgaccagccgggacggcgagccaagaatgatcgtgggcaagaacgagcggggcaagtctctgctgttcaagaccgccagcggcatcaatatgtgcaccctgatcgccatggatctgggcgagatgtgcgacgataccgtgacatacaagtgtcctctgatcgccgaggtggagccagaggatatcgactgctggtgtaacctgaccagcacatgggtgacatatggcacctgcaatcaggcaggagagcacaggagagacaagcggagcgtggccctggccccacacgtgggaatgggcctggatacccggacacagacctggatgtctgccgagggagcatggaggcaggtggagaaggtggagacatgggccctgagacaccccgggtttaccatcctggccctgttcctggcccactacatcggcacatctctgacccagaaggtggtcatcttcatcctgctgatgctggtgacccctagcatgacaatgcggtgcgtgggcgtgggcaacagagacttcgtggagggcctgagcggagcaacctgggtggatgtggtgctggagcacggaggatgcgtgaccacaatggccaagaataagcccacactggacatcgagctgcagaagacagaggcaacccagctggccaccctgcgcaagctgtgcatcgagggcaagatcacaaacatcaccacaggctctcggtgtccaacccagggagaggcaatcctgccagaggagcaggaccagaactacgtgtgcaagcacacatatgtggataggggctggggcaatggctgtggcctgtttggcaagggcagcctggtgacctgcgccaagttccagtgtctggagcctatcgagggcaaggtggtgcagtacgagaacctgaagtataccgtgatcatcacagtgcacaccggcgatcagccacaagtgggaaatgacacccagggcgtgacagtggagatcacccctcaggcctccaccgtggaggccgtgctgctggagtacggcacactgggcctgaagtgctctcctagaaccggcctggactttaacgagatgatcctgctgacaatgaagaccaaggcctggatggtgcacaggcagtggttctttgatctgccactgccctggacatctggcgccaccacagagacaccaacctggaaccgcaaggagctgctggtgaccttcaagaatgcccacgccaagaagcaggaggtggtggtgctgggatcccaggagggagcaatgcacacagccctgaccggagccacagagatccagaacagcggcggcacatccatctttgccggccacctgaagtgccggctgaagatggacaagctggagctgaagggcatgtcttacgccatgtgcctgaataccttcgtgctgaagaaggaggtgagcgagacacagcacggcaccatcctgatcaaggtggagtataagggcgaggacgccccctgtaagatcccttttagcaccgaggatggacagggcaaggcacacaacggccgcctgatcacagccaatcctgtggtgaccaagaaggaggagccagtgaacatcgaggccgagccacccttcggcgagtccaatatcgtgatcggcatcggcgacaaggccctgaagatcaactggtacaagaagggcagctccatcggcaagatgtttgaggcaacagccagaggcgcccggaggatggccatcctgggcgataccgcatgggacttcggctccgtgggaggcgtgctgaattctctgggcaagatggtgcaccagatctttggctccgcctataccgccctgttctccggcgtgtcttggatcatgaagatcggcatcggcgtgctgctgacatggatcggcctgaactctaagaatacctccatgtctttcagctgcatcgtgatcggcatcatcaccctgtacctgggcgcagtggtgcaggcagacatgggctgcgtgatcaactggaagggcaaggagctgaagtgtggctctggcatctttgtgacaaatgaggtgcacacatggaccgagcagtataagttccaggcagatagcccaaagcgcctggccaccgcaatcgcaggagcatgggagaacggcgtgtgcggcatccggtccaccacaagaatggagaatctgctgtggaagcagatcgccaacgagctgaattacatcctgtgggagaacaatatcaagctgaccgtggtggtgggcgacatcatcggcgtgctggagcagggcaagagaacactgacccctcagccaatggagctgaagtatagctggaagacatggggcaaggccaagatcgtgaccgccgagacacagaactctagcttcatcatcgacggccccaatacccctgagtgcccatccgcctctagggcctggaacgtgtgggaggtggaggattacggctttggcgtgttcaccacaaatatctggctgaagctgagagaggtgtacacccagagctgtgatcacaggctgatgtccgccgccatcaaggatgagagggccgtgcacgcagacatgggatactggatcgagagccagaagaacggctcctggaagctggagaaggcctcctttatcgaggtgaagacatgcacctggcccaagtctcacaccctgtggagcaacggcgtgctggagtctgacatgatcatcccaaagtccctggccggccccatctctcagcacaatcacaggcccggctaccacacacagaccgcaggaccttggcacctgggcaagctggagctggatttcaactattgcgagggcaccacagtggtcatcacagagaattgtggcaccaggggcccatctctgcgcaccacaaccgtgagcggcaagctgatccacgagtggtgctgtcggtcctgcaccctgcctccactgagatacatgggcgaggacggctgttggtatggcatggagatccgccccatcaacgagaaggaggagaatatggtgaagagcctggtgtccgccggctctggcaaggtggataacttcaccatgggcgtgctgtgcctggccatcctgtttgaggaagtgatgcggggcaagttcggcaagaagcacatgatcgccggcgtgctgttcacctttgtgctgctgctgagcggccagatcacatggagagacatggcccacaccctgatcatgatcggcagcaatgcctccgataggatgggcatgggcgtgacatacctggccctgatcgccacctttaagatccagccattcctggccctgggcttctttctgcggaagctgacctccagagagaacctgctgctgggcgtgggcctggccatggcaacaaccctgcagctgcccgaggacatcgagcagatggccaatggcatcgccctgggcctgatgacactgaagctgatcacacagtttgagacatatcagctgtggaccgccctggtgtctctgacatgcagcaacaccatcttcacactgaccgtggcatggcgcacagccaccctgatcctggcaggcgtgagcctgctgccactgtgccagtcctctagcatgcggaagacagactggctgcctatgaccgtggcagcaatgggcgtgccccctctgccactgttcatctttagcctgaaggatacccctaagcggagatcctggccactgaacgagggcgtgatggcagtgggcctggtgtccatcctggcctcctctctgctgagaaatgacgtgccaatggcaggacccctggtggcaggaggcctgctgatcgcctgctacgtgatcacaggcaccagcgccgatctgaccgtggagaaggcagcagacgtgacatgggaggaggaggcagagcagaccggcgtgtcccacaacctgatgatcacagtggacgatgacggcaccatgaggatcaaggatgacgagacagagaatatcctgaccgtgctgctgaagacagccctgctgatcgtgagcggcatcttcccttactccatcccagccaccctgctggtgtggcacacctggcagaagcagacacagcggagcggcgtgctgtgggacgtgccaagcccaccagagacacagaaggccgagctggaggagggcgtgtatcggatcaagcagcagggcatctttggcaagacccaagtgggagtgggcgtgcagaaggagggcgtgttccacaccatgtggcacgtgacacggggcgccgtgctgacccacaacggcaagagactggagccaaattgggcctccgtgaagaaggacctgatctcttacggcggaggatggcggctgagcgcccagtggcagaagggagaggaggtgcaggtcatcgcagtggagcccggcaagaaccctaagaattttcagaccatgcctggcatcttccagacaaccacaggagagatcggagcaattgcactagacttcaagcctggaacttcaggatctcctatcataaacagagagggaaaggtagtaggactgtatggcaatggagtggttacaaaaaatggtggctacgtcagtggaatagcgcaaacaaatgcagaaccagacggaccgacaccggaattggaagaagaaatgttcaaaaagcgaaatctaaccataatggatcttcatcctgggtcaggaaagacgcggaaatatcttccagccatcgtcagagaagcaatcaagagacggttaagaactctaattttggcaccaacaagagtggttgcagctgaaatggaagaagcactgaaaggactcccaataaggtatcaaacaactgcaacaaaatctgaacacacaggaagggagattgttgatctaatgtgccacgcaacattcacaatgcgcttgctatcaccagtcagggttccaaattacaatttgataataatggatgaggcccatttcacagatccagccagtatagcggctagagggtacatatcaactcgtgtaggaatgggagaggcagctgcaattttcatgacagcaacaccccctggaactgctgaagcctttccccagagcaacgctccaattcaagatgaagaaagggatattccggaacgctcatggaattcaggcaatgaatggattaccgactttgttgggaagacggtgtggtttgtccctagcatcaaagccggaaatgacatagcaaactgcctgcgaaaaaatggaaaaaaggtcatccaacttagtaggaagacttttgatacagaatatcagaagaccagactgaatgattgggacttcctggtgacaacagacatttcagaaatgggagctaactttaaagcagatagagtgattgacccaagaagatgtctcaagccagtaattttgacagatggacccgagcgagtgatcctggctggaccaatgccagtcaccgcagcgagcgctgcgcaaaggagagggagagttggcaggaacccacaaaaagaaaatgaccagtacatattcacgggccagcctctcaacaatgacgaagaccatgctcactggacagaagcaaaaatgctgctagacaacatcaacacaccagaagggatcataccagctctctttgaaccagagagggagaagtcagccgctatagacggtgaataccgcctgaagggtgagtccaggaagaccttcgtggaactcatgaggaggggtgacctcccagtttggctagcccataaagtagcctcagaagggatcaaatacacagatagaaaatggtgctttgatggagaacgtaataatcaaattttagaggagaacatggatgtggaaatctggacaaaggaaggagaaaggaaaaaattgagacccaggtggcttgatgcccgcacttattcagatcccttagcactcaaggaattcaaggattttgcagctggcagaaagtcaatcgcccttgatcttgtgacagaaataggaagagtgccttcacacttagcccacagaacgagaaacgccctggacaatttggtgatgctgcacacgtcagaacatggcggtagggcctacaggcatgcagtggaggaactaccagaaacaatggaaacactcctactcttgggactcatgatcttattaacaggtggagcaatgcttttcttgatatcaggtaaagggattggaaagacttcaataggactcatttgtgttattgtttccagtggcatgttatggatggctgatgtcccacttcaatggatcgcgtcggctatagtcctggaatttttcatgatggtgttgctcataccagaaccagaaaaacaaagaactccccaagacaaccaactcgcatatgtcgtgataggcatacttacactggctgcgatagtagcagctaatgaaatgggattactggaaactacaaagagagatttaggaatgtctaaagaaccaggtgttgtttctccaaccagctatttagatgtagacttgcacccagcatcagcctggacattgtacgccgtggccacaacagtaataacaccaatgttgagacataccatagagaattccacagcaaatgtgtccctggcagccatagctaaccaggcagtggtcctgatgggtttagacaaaggatggccaatatcgaaaatggacctaggcgtaccgctactggcactgggctgctattcacaagtgaacccactgactctcacagcggcagtacttctgctagtcacacattatgccattataggtccaggattgcaggctaaagccactcgtgaagctcaaaaaagaacagctgctggaataatgaagaatccaacggtggatgggataatgacaatagacctagatcctgtaatatacgattcaaaattcgaaaagcaactaggacaggtcatgctcctggttctgtgtgcagttcaacttttgttaatgagaacatcatgggccttgtgtgaagctctaaccctagccacaggaccaataacaacactctgggaaggatcacctggaaagttttggaacaccacgatagctgtttccatggctaacatctttagagggagctacttagcaggaactgggcttgctttttctatcatgaaatcagttggaacaggaaggagaggaacggggtcacaaggcgaaaccttaggagaaaagtggaaaaagaaattaaatcagttatcccggaaagagtttgacctttacaagaaatctggaatcactgaagtggatagaacagaagccaaagaagggttgaaaagaggagaaacaacacatcatgccgtgtccagaggcagcgcaaaacttcaatggttcgtggagaggaacatggtcattcccgaaggaagagtcatagacttaggctgtggaagaggaggctggtcatattactgcgcaggactgaaaaaagttacagaagtgcgaggatacacaaaaggcggcccaggacacgaagaaccagtacctatgtctacatacggatggaacatagtcaagttaatgagtggaaaggacgtgttttatcttccacctgaaaagtgtgacaccctattgtgtgacattggagaatcttcaccaagcccaacagtggaagaaagcagaactataagagttttgaagatggttgagccatggctaaaaaacaaccagttttgcattaaagtattaaacccttacatgccaactgtgattgagcacctagaaagactacaaagaaaatatggaggaatgcttgtgagaaacccactctcacgaaactccacgcatgaaatgtactggatatccaatggcaccggcaacattgtctcttcagtcaacatggtatccagattgctactgaacagatttacgatgacacacaggagacccaccatagagaaagatgtggatttgggagcaggaactcgacatgtcaatgcggaaccagaaacacccaacatggacgtcattggagaaagaataaaaaggatcaaggaggagcatagttcaacatggcactatgatgatgaaaatccttacaaaacgtgggcttaccatggctcctatgaagtcaaagccacaggctcagcctcctccatgataaatggagtcgtgaaactcctcacaaaaccatgggatgtggttcccatggtgacacagatggcaatgacagacacaactccatttgggcagcaaagagttttcaaagagaaagtggacaccaggacacccaggcccatgccagggacaagaaaggttatggagattacagcggaatggctttggagaaccctgggaaggaacaaaaaacccagattgtgcacaagggaagagttcacaaaaaaggtcagaaccaacgcggctatgggagctgttttcacagaggagaaccaatgggatagtgcgagagctgctgttgaggacgaggaattctggaaacttgtggacagagaacgtgaactccacaaattgggcaagtgtggaagctgcgtctacaacatgatgggcaagagagagaagaaacttggagagtttggcaaagcaaaaggcagtagagctatatggtacatgtggttgggagccaggtaccttgagttcgaagcactcggatttttaaatgaagaccactggttctcgcgtgaaaactcttacagtggagtagaaggagaaggactgcacaagctgggatacattttaagagacatttctaagatacccggaggagccatgtatgctgatgacacagctggttgggacacaagaataacagaagatgacctgcacaatgaggaaaaaatcacacagcaaatggaccctgaacacagacaattagcgaacgccatatttaagctcacataccaaaacaaagtggtcaaagtccaacgaccaactccaaaaggcacggtaatggacatcatatctaggaaagaccaaagaggcagtggacaggtggggacttatggtctgaacacattcaccaacatggaagcccagttagtcagacagatggaaggagaaggcgtgttgtcgaaggcagacctcgagaaccctcatctgctagagaagaaaatcacacaatggttggaaaccaaaggagtggagagattaaaaagaatggccatcagcggggatgattgcgtggtgaaaccgatcgatgacaggtttgccaatgccctgcttgccctgaacgacatgggaaaggttaggaaggacatacctcaatggcagccatcaaaggggtggcatgattggcaacaggtccctttctgctcccaccactttcatgaactgatcatgaaagatggaagaaagttggtggttccctgcagaccccaggacgaactaataggaagggcgagaatttctcaaggagcaggatggagccttaaagaaactgcatgtctagggaaagcctacgctcaaatgtggagtctcatgtattttcacagaagagatcttagactagcatccaacgccatttgttcagcagtaccagtccattgggtccctacaagcagaacgacatggtctattcacgctcaccatcagtggatgactacagaagacatgcttactgtctggaacagggtgtggatagaggacaatccatggatggaagacaaaactccagtcacaacttgggaagatgttccatacctggggaagagagaagatcaatggtgcggatcactcattggtctcacttccagagcaacctgggcccagaacatactcacagcaatccaacaggtgagaagccttataggcgatgaagaatttctggactacatgccttcgatgaagagattcaggaaggaggaggagtcagagggagccatttggtaaacaaaggaagtaaaaaagagacaaactgtcaggccaccttaagccacagtacggaagaagctgtgcagcctgtgagccccgtccaaggacgttaaaagaagaagtcaggcccaaaagccacggcttgagcaaaccgtgctgcctgtagctccgtcgtggggacgtaaagcctgggaggctgcaaaccgtggaagctgtacgcacggtgtagcagactagcggttagaggagacccctcccatgacacaacgcagcagcggggcccgagcactgagggaagctgtacctccttgcaaaggactagaggttagaggagaccccccgcaaataaaaacagcatattgacgctgggagagaccagagatcctgctgtctcctcagcatcattccaggcacagaacgccagaaaatggaatggtgctgttgaatcaacaggttct

SEQ ID NO: 24 - DNA, 10173 bp, synthetic construct
  source 1..10173: mol_type = other DNA
atgaacaaccaacgaaaaaagacgggaaaaccgtctatcaatatgctgaaacgcgtgagaaaccgtgtgtcaactggctcacagctggccaagcggttctccagaggcctgctgaacggacagggacccatgaagctggtcatggccttcatcgcctttctgcgcttcctggcaatcccacctacagcaggcgtgctggccagatggggcacctttaagaagagcggcgccatcaaggtgctgaagggcttcaagaaggagatctccaacatgctgtctatcatcaataagcgcaagaagaccagcctgtgcctgatgatgatgctgcctgccacactggcctttcacctgaccagccgggacggcgagccaagaatgatcgtgggcaagaacgagcggggcaagtctctgctgttcaagaccgccagcggcatcaatatgtgcaccctgatcgccatggatctgggcgagatgtgcgacgataccgtgacatacaagtgtcctctgatcgccgaggtggagccagaggatatcgactgctggtgtaacctgaccagcacatgggtgacatatggcacctgcaatcaggcaggagagcacaggagagacaagcggagcgtggccctggccccacacgtgggaatgggcctggatacccggacacagacctggatgtctgccgagggagcatggaggcaggtggagaaggtggagacatgggccctgagacaccccgggtttaccatcctggccctgttcctggcccactacatcggcacatctctgacccagaaggtggtcatcttcatcctgctgatgctggtgacccctagcatgacaatgcggtgcgtgggcgtgggcaacagagacttcgtggagggcctgagcggagcaacctgggtggatgtggtgctggagcacggaggatgcgtgaccacaatggccaagaataagcccacactggacatcgagctgcagaagacagaggcaacccagctggccaccctgcgcaagctgtgcatcgagggcaagatcacaaacatcaccacaggctctcggtgtccaacccagggagaggcaatcctgccagaggagcaggaccagaactacgtgtgcaagcacacatatgtggataggggctggggcaatggctgtggcctgtttggcaagggcagcctggtgacctgcgccaagttccagtgtctggagcctatcgagggcaaggtggtgcagtacgagaacctgaagtataccgtgatcatcacagtgcacaccggcgatcagccacaagtgggaaatgacacccagggcgtgacagtggagatcacccctcaggcctccaccgtggaggccgtgctgctggagtacggcacactgggcctgaagtgctctcctagaaccggcctggactttaacgagatgatcctgctgacaatgaagaccaaggcctggatggtgcacaggcagtggttctttgatctgccactgccctggacatctggcgccaccacagagacaccaacctggaaccgcaaggagctgctggtgaccttcaagaatgcccacgccaagaagcaggaggtggtggtgctgggatcccaggagggagcaatgcacacagccctgaccggagccacagagatccagaacagcggcggcacatccatctttgccggccacctgaagtgccggctgaagatggacaagctggagctgaagggcatgtcttacgccatgtgcctgaataccttcgtgctgaagaaggaggtgagcgagacacagcacggcaccatcctgatcaaggtggagtataagggcgaggacgccccctgtaagatcccttttagcaccgaggatggacagggcaaggcacacaacggccgcctgatcacagccaatcctgtggtgaccaagaaggaggagccagtgaacatcgaggccgagccacccttcggcgagtccaatatcgtgatcggcatcggcgacaaggccctgaagatcaactggtacaagaagggcagctccatcggcaagatgtttgaggcaacagccagaggcgcccggaggatggccatcctgggcgataccgcatgggacttcggctccgtgggaggcgtgctgaattctctgggcaagatggtgcaccagatctttggctccgcctataccgccctgttctccggcgtgtcttggatcatgaagatcggcatcggcgtgctgctgacatggatcggcctgaactctaagaatacctccatgtctttcagctgcatcgtgatcggcatcatcaccctgtacctgggcgcagtggtgcaggcagacatgggctgcgtgatcaactggaagggcaaggagctgaagtgtggctctggcatctttgtgacaaatgaggtgcacacatggaccgagcagtataagttccaggcagatagcccaaagcgcctggccaccgcaatcgcaggagcatgggagaacggcgtgtgcggcatccggtccaccacaagaatggagaatctgctgtggaagcagatcgccaacgagctgaattacatcctgtgggagaacaatatcaagctgaccgtggtggtgggcgacatcatcggcgtgctggagcagggcaagagaacactgacccctcagccaatggagctgaagtatagctggaagacatggggcaaggccaagatcgtgaccgccgagacacagaactctagcttcatcatcgacggccccaatacccctgagtgcccatccgcctctagggcctggaacgtgtgggaggtggaggattacggctttggcgtgttcaccacaaatatctggctgaagctgagagaggtgtacacccagagctgtgatcacaggctgatgtccgccgccatcaaggatgagagggccgtgcacgcagacatgggatactggatcgagagccagaagaacggctcctggaagctggagaaggcctcctttatcgaggtgaagacatgcacctggcccaagtctcacaccctgtggagcaacggcgtgctggagtctgacatgatcatcccaaagtccctggccggccccatctctcagcacaatcacaggcccggctaccacacacagaccgcaggaccttggcacctgggcaagctggagctggatttcaactattgcgagggcaccacagtggtcatcacagagaattgtggcaccaggggcccatctctgcgcaccacaaccgtgagcggcaagctgatccacgagtggtgctgtcggtcctgcaccctgcctccactgagatacatgggcgaggacggctgttggtatggcatggagatccgccccatcaacgagaaggaggagaatatggtgaagagcctggtgtccgccggctctggcaaggtggataacttcaccatgggcgtgctgtgcctggccatcctgtttgaggaagtgatgcggggcaagttcggcaagaagcacatgatcgccggcgtgctgttcacctttgtgctgctgctgagcggccagatcacatggagagacatggcccacaccctgatcatgatcggcagcaatgcctccgataggatgggcatgggcgtgacatacctggccctgatcgccacctttaagatccagccattcctggccctgggcttctttctgcggaagctgacctccagagagaacctgctgctgggcgtgggcctggccatggcaacaaccctgcagctgcccgaggacatcgagcagatggccaatggcatcgccctgggcctgatgacactgaagctgatcacacagtttgagacatatcagctgtggaccgccctggtgtctctgacatgcagcaacaccatcttcacactgaccgtggcatggcgcacagccaccctgatcctggcaggcgtgagcctgctgccactgtgccagtcctctagcatgcggaagacagactggctgcctatgaccgtggcagcaatgggcgtgccccctctgccactgttcatctttagcctgaaggatacccctaagcggagatcctggccactgaacgagggcgtgatggcagtgggcctggtgtccatcctggcctcctctctgctgagaaatgacgtgccaatggcaggacccctggtggcaggaggcctgctgatcgcctgctacgtgatcacaggcaccagcgccgatctgaccgtggagaaggcagcagacgtgacatgggaggaggaggcagagcagaccggcgtgtcccacaacctgatgatcacagtggacgatgacggcaccatgaggatcaaggatgacgagacagagaatatcctgaccgtgctgctgaagacagccctgctgatcgtgagcggcatcttcccttactccatcccagccaccctgctggtgtggcacacctggcagaagcagacacagcggagcggcgtgctgtgggacgtgccaagcccaccagagacacagaaggccgagctggaggagggcgtgtatcggatcaagcagcagggcatctttggcaagacccaagtgggagtgggcgtgcagaaggagggcgtgttccacaccatgtggcacgtgacacggggcgccgtgctgacccacaacggcaagagactggagccaaattgggcctccgtgaagaaggacctgatctcttacggcggaggatggcggctgagcgcccagtggcagaagggagaggaggtgcaggtcatcgcagtggagcccggcaagaaccctaagaattttcagaccatgcctggcatcttccagacaaccacaggagagatcggagcaattgcactagacttcaagcctggaacttcaggatctcctatcataaacagagagggaaaggtagtaggactgtatggcaatggagtggttacaaaaaatggtggctacgtcagtggaatagcgcaaacaaatgcagaaccagacggaccgacaccggaattggaagaagaaatgttcaaaaagcgaaatctaaccataatggatcttcatcctgggtcaggaaagacgcggaaatatcttccagccatcgtcagagaagcaatcaagagacggttaagaactctaattttggcaccaacaagagtggttgcagctgaaatggaagaagcactgaaaggactcccaataaggtatcaaacaactgcaacaaaatctgaacacacaggaagggagattgttgatctaatgtgccacgcaacattcacaatgcgcttgctatcaccagtcagggttccaaattacaatttgataataatggatgaggcccatttcacagatccagccagtatagcggctagagggtacatatcaactcgtgtaggaatgggagaggcagctgcaattttcatgacagcaacaccccctggaactgctgaagcctttccccagagcaacgctccaattcaagatgaagaaagggatattccggaacgctcatggaattcaggcaatgaatggattaccgactttgttgggaagacggtgtggtttgtccctagcatcaaagccggaaatgacatagcaaactgcctgcgaaaaaatggaaaaaaggtcatccaacttagtaggaagacttttgatacagaatatcagaagaccagactgaatgattgggacttcctggtgacaacagacatttcagaaatgggagctaactttaaagcagatagagtgattgacccaagaagatgtctcaagccagtaattttgacagatggacccgagcgagtgatcctggctggaccaatgccagtcaccgcagcgagcgctgcgcaaaggagagggagagttggcaggaacccacaaaaagaaaatgaccagtacatattcacgggccagcctctcaacaatgacgaagaccatgctcactggacagaagcaaaaatgctgctagacaacatcaacacaccagaagggatcataccagctctctttgaaccagagagggagaagtcagccgctatagacggtgaataccgcctgaagggtgagtccaggaagaccttcgtggaactcatgaggaggggtgacctcccagtttggctagcccataaagtagcctcagaagggatcaaatacacagatagaaaatggtgctttgatggagaacgtaataatcaaattttagaggagaacatggatgtggaaatctggacaaaggaaggagaaaggaaaaaattgagacccaggtggcttgatgcccgcacttattcagatcccttagcactcaaggaattcaaggattttgcagctggcagaaagtcaatcgcccttgatcttgtgacagaaataggaagagtgccttcacacttagcccacagaacgagaaacgccctggacaatttggtgatgctgcacacgtcagaacatggcggtagggcctacaggcatgcagtggaggaactaccagaaacaatggaaacactcctactcttgggactcatgatcttattaacaggtggagcaatgcttttcttgatatcaggtaaagggattggaaagacttcaataggactcatttgtgttattgtttccagtggcatgttatggatggctgatgtcccacttcaatggatcgcgtcggctatagtcctggaatttttcatgatggtgttgctcataccagaaccagaaaaacaaagaactccccaagacaaccaactcgcatatgtcgtgataggcatacttacactggctgcgatagtagcagctaatgaaatgggattactggaaactacaaagagagatttaggaatgtctaaagaaccaggtgttgtttctccaaccagctatttagatgtagacttgcacccagcatcagcctggacattgtacgccgtggccacaacagtaataacaccaatgttgagacataccatagagaattccacagcaaatgtgtccctggcagccatagctaaccaggcagtggtcctgatgggtttagacaaaggatggccaatatcgaaaatggacctaggcgtaccgctactggcactgggctgctattcacaagtgaacccactgactctcacagcggcagtacttctgctagtcacacattatgccattataggtccaggattgcaggctaaagccactcgtgaagctcaaaaaagaacagctgctggaataatgaagaatccaacggtggatgggataatgacaatagacctagatcctgtaatatacgattcaaaattcgaaaagcaactaggacaggtcatgctcctggttctgtgtgcagttcaacttttgttaatgagaacatcatgggccttgtgtgaagctctaaccctagccacaggaccaataacaacactctgggaaggatcacctggaaagttttggaacaccacgatagctgtttccatggctaacatctttagagggagctacttagcaggaactgggcttgctttttctatcatgaaatcagttggaacaggaaggagaggaacggggtcacaaggcgaaaccttaggagaaaagtggaaaaagaaattaaatcagttatcccggaaagagtttgacctttacaagaaatctggaatcactgaagtggatagaacagaagccaaagaagggttgaaaagaggagaaacaacacatcatgccgtgtccagaggcagcgcaaaacttcaatggttcgtggagaggaacatggtcattcccgaaggaagagtcatagacttaggctgtggaagaggaggctggtcatattactgcgcaggactgaaaaaagttacagaagtgcgaggatacacaaaaggcggcccaggacacgaagaaccagtacctatgtctacatacggatggaacatagtcaagttaatgagtggaaaggacgtgttttatcttccacctgaaaagtgtgacaccctattgtgtgacattggagaatcttcaccaagcccaacagtggaagaaagcagaactataagagttttgaagatggttgagccatggctaaaaaacaaccagttttgcattaaagtattaaacccttacatgccaactgtgattgagcacctagaaagactacaaagaaaatatggaggaatgcttgtgagaaacccactctcacgaaactccacgcatgaaatgtactggatatccaatggcaccggcaacattgtctcttcagtcaacatggtatccagattgctactgaacagatttacgatgacacacaggagacccaccatagagaaagatgtggatttgggagcaggaactcgacatgtcaatgcggaaccagaaacacccaacatggacgtcattggagaaagaataaaaaggatcaaggaggagcatagttcaacatggcactatgatgatgaaaatccttacaaaacgtgggcttaccatggctcctatgaagtcaaagccacaggctcagcctcctccatgataaatggagtcgtgaaactcctcacaaaaccatgggatgtggttcccatggtgacacagatggcaatgacagacacaactccatttgggcagcaaagagttttcaaagagaaagtggacaccaggacacccaggcccatgccagggacaagaaaggttatggagattacagcggaatggctttggagaaccctgggaaggaacaaaaaacccagattgtgcacaagggaagagttcacaaaaaaggtcagaaccaacgcggctatgggagctgttttcacagaggagaaccaatgggatagtgcgagagctgctgttgaggacgaggaattctggaaacttgtggacagagaacgtgaactccacaaattgggcaagtgtggaagctgcgtctacaacatgatgggcaagagagagaagaaacttggagagtttggcaaagcaaaaggcagtagagctatatggtacatgtggttgggagccaggtaccttgagttcgaagcactcggatttttaaatgaagaccactggttctcgcgtgaaaactcttacagtggagtagaaggagaaggactgcacaagctgggatacattttaagagacatttctaagatacccggaggagccatgtatgctgatgacacagctggttgggacacaagaataacagaagatgacctgcacaatgaggaaaaaatcacacagcaaatggaccctgaacacagacaattagcgaacgccatatttaagctcacataccaaaacaaagtggtcaaagtccaacgaccaactccaaaaggcacggtaatggacatcatatctaggaaagaccaaagaggcagtggacaggtggggacttatggtctgaacacattcaccaacatggaagcccagttagtcagacagatggaaggagaaggcgtgttgtcgaaggcagacctcgagaaccctcatctgctagagaagaaaatcacacaatggttggaaaccaaaggagtggagagattaaaaagaatggccatcagcggggatgattgcgtggtgaaaccgatcgatgacaggtttgccaatgccctgcttgccctgaacgacatgggaaaggttaggaaggacatacctcaatggcagccatcaaaggggtggcatgattggcaacaggtccctttctgctcccaccactttcatgaactgatcatgaaagatggaagaaagttggtggttccctgcagaccccaggacgaactaataggaagggcgagaatttctcaaggagcaggatggagccttaaagaaactgcatgtctagggaaagcctacgctcaaatgtggagtctcatgtattttcacagaagagatcttagactagcatccaacgccatttgttcagcagtaccagtccattgggtccctacaagcagaacgacatggtctattcacgctcaccatcagtggatgactacagaagacatgcttactgtctggaacagggtgtggatagaggacaatccatggatggaagacaaaactccagtcacaacttgggaagatgttccatacctggggaagagagaagatcaatggtgcggatcactcattggtctcacttccagagcaacctgggcccagaacatactcacagcaatccaacaggtgagaagccttataggcgatgaagaatttctggactacatgccttcgatgaagagattcaggaaggaggaggagtcagagggagccatttggtaa

SEQ ID NO: 25 - DNA, 10707 bp, synthetic construct
  source 1..10707: mol_type = other DNA
agttgttagtctacgtggaccgacaagaacagtttcgactcggaagcttgcttaacgtagtgctgacagttttttattagagagcagatttctgatgaacaaccaacgaaaaaagacgggaaaaccgtctatcaatatgctgaaacgcgtgagaaaccgtgtgtcaactggctcacagctggccaagcggttctccagaggcctgctgaacggacagggacccatgaagctggtcatggccttcatcgcctttctgcgcttcctggcaatcccacctacagcaggcgtgctggccagatggggcacctttaagaagagcggcgccatcaaggtgctgaagggcttcaagaaggagatctccaacatgctgtctatcatcaataagcgcaagaagaccagcctgtgcctgatgatgatgctgcctgccacactggcctttcacctgaccagccgggacggcgagccaagaatgatcgtgggcaagaacgagcggggcaagtctctgctgttcaagaccgccagcggcatcaatatgtgcaccctgatcgccatggatctgggcgagatgtgcgacgataccgtgacatacaagtgtcctctgatcgccgaggtggagccagaggatatcgactgctggtgtaacctgaccagcacatgggtgacatatggcacctgcaatcaggcaggagagcacaggagagacaagcggagcgtggccctggccccacacgtgggaatgggcctggatacccggacacagacctggatgtctgccgagggagcatggaggcaggtggagaaggtggagacatgggccctgagacaccccgggtttaccatcctggccctgttcctggcccactacatcggcacatctctgacccagaaggtggtcatcttcatcctgctgatgctggtgacccctagcatgacaatgcggtgcgtgggcgtgggcaacagagacttcgtggagggcctgagcggagcaacctgggtggatgtggtgctggagcacggaggatgcgtgaccacaatggccaagaataagcccacactggacatcgagctgcagaagacagaggcaacccagctggccaccctgcgcaagctgtgcatcgagggcaagatcacaaacatcaccacaggctctcggtgtccaacccagggagaggcaatcctgccagaggagcaggaccagaactacgtgtgcaagcacacatatgtggataggggctggggcaatggctgtggcctgtttggcaagggcagcctggtgacctgcgccaagttccagtgtctggagcctatcgagggcaaggtggtgcagtacgagaacctgaagtataccgtgatcatcacagtgcacaccggcgatcagccacaagtgggaaatgacacccagggcgtgacagtggagatcacccctcaggcctccaccgtggaggccgtgctgctggagtacggcacactgggcctgaagtgctctcctagaaccggcctggactttaacgagatgatcctgctgacaatgaagaccaaggcctggatggtgcacaggcagtggttctttgatctgccactgccctggacatctggcgccaccacagagacaccaacctggaaccgcaaggagctgctggtgaccttcaagaatgcccacgccaagaagcaggaggtggtggtgctgggatcccaggagggagcaatgcacacagccctgaccggagccacagagatccagaacagcggcggcacatccatctttgccggccacctgaagtgccggctgaagatggacaagctggagctgaagggcatgtcttacgccatgtgcctgaataccttcgtgctgaagaaggaggtgagcgagacacagcacggcaccatcctgatcaaggtggagtataagggcgaggacgccccctgtaagatcccttttagcaccgaggatggacagggcaaggcacacaacggccgcctgatcacagccaatcctgtggtgaccaagaaggaggagccagtgaacatcgaggccgagccacccttcggcgagtccaatatcgtgatcggcatcggcgacaaggccctgaagatcaactggtacaagaagggcagctccatcggcaagatgtttgaggcaacagccagaggcgcccggaggatggccatcctgggcgataccgcatgggacttcggctccgtgggaggcgtgctgaattctctgggcaagatggtgcaccagatctttggctccgcctataccgccctgttctccggcgtgtcttggatcatgaagatcggcatcggcgtgctgctgacatggatcggcctgaactctaagaatacctccatgtctttcagctgcatcgtgatcggcatcatcaccctgtacctgggcgcagtggtgcaggcagacatgggctgcgtgatcaactggaagggcaaggagctgaagtgtggctctggcatctttgtgacaaatgaggtgcacacatggaccgagcagtataagttccaggcagatagcccaaagcgcctggccaccgcaatcgcaggagcatgggagaacggcgtgtgcggcatccggtccaccacaagaatggagaatctgctgtggaagcagatcgccaacgagctgaattacatcctgtgggagaacaatatcaagctgaccgtggtggtgggcgacatcatcggcgtgctggagcagggcaagagaacactgacccctcagccaatggagctgaagtatagctggaagacatggggcaaggccaagatcgtgaccgccgagacacagaactctagcttcatcatcgacggccccaatacccctgagtgcccatccgcctctagggcctggaacgtgtgggaggtggaggattacggctttggcgtgttcaccacaaatatctggctgaagctgagagaggtgtacacccagagctgtgatcacaggctgatgtccgccgccatcaaggatgagagggccgtgcacgcagacatgggatactggatcgagagccagaagaacggctcctggaagctggagaaggcctcctttatcgaggtgaagacatgcacctggcccaagtctcacaccctgtggagcaacggcgtgctggagtctgacatgatcatcccaaagtccctggccggccccatctctcagcacaatcacaggcccggctaccacacacagaccgcaggaccttggcacctgggcaagctggagctggatttcaactattgcgagggcaccacagtggtcatcacagagaattgtggcaccaggggcccatctctgcgcaccacaaccgtgagcggcaagctgatccacgagtggtgctgtcggtcctgcaccctgcctccactgagatacatgggcgaggacggctgttggtatggcatggagatccgccccatcaacgagaaggaggagaatatggtgaagagcctggtgtccgccggctctggcaaggtggataacttcaccatgggcgtgctgtgcctggccatcctgtttgaggaagtgatgcggggcaagttcggcaagaagcacatgatcgccggcgtgctgttcacctttgtgctgctgctgagcggccagatcacatggagagacatggcccacaccctgatcatgatcggcagcaatgcctccgataggatgggcatgggcgtgacatacctggccctgatcgccacctttaagatccagccattcctggccctgggcttctttctgcggaagctgacctccagagagaacctgctgctgggcgtgggcctggccatggcaacaaccctgcagctgcccgaggacatcgagcagatggccaatggcatcgccctgggcctgatgacactgaagctgatcacacagtttgagacatatcagctgtggaccgccctggtgtctctgacatgcagcaacaccatcttcacactgaccgtggcatggcgcacagccaccctgatcctggcaggcgtgagcctgctgccactgtgccagtcctctagcatgcggaagacagactggctgcctatgaccgtggcagcaatgggcgtgccccctctgccactgttcatctttagcctgaaggatacccctaagcggagatcctggccactgaacgagggcgtgatggcagtgggcctggtgtccatcctggcctcctctctgctgagaaatgacgtgccaatggcaggacccctggtggcaggaggcctgctgatcgcctgctacgtgatcacaggcaccagcgccgatctgaccgtggagaaggcagcagacgtgacatgggaggaggaggcagagcagaccggcgtgtcccacaacctgatgatcacagtggacgatgacggcaccatgaggatcaaggatgacgagacagagaatatcctgaccgtgctgctgaagacagccctgctgatcgtgagcggcatcttcccttactccatcccagccaccctgctggtgtggcacacctggcagaagcagacacagcggagcggcgtgctgtgggacgtgccaagcccaccagagacacagaaggccgagctggaggagggcgtgtatcggatcaagcagcagggcatctttggcaagacccaagtgggagtgggcgtgcagaaggagggcgtgttccacaccatgtggcacgtgacacggggcgccgtgctgacccacaacggcaagagactggagccaaattgggcctccgtgaagaaggacctgatctcttacggcggaggatggcggctgagcgcccagtggcagaagggagaggaggtgcaggtcatcgcagtggagcccggcaagaaccctaagaattttcagaccatgcctggcatcttccagacaaccacaggagagatcggagcaattgccctggacttcaagcccggcacaagcggctcccctatcatcaacagggagggcaaggtggtgggcctgtacggcaacggcgtggtgaccaagaatggcggctacgtgagcggcatcgcacagacaaacgcagagcctgacggaccaacccctgagctggaggaggagatgttcaagaagcggaatctgacaatcatggatctgcaccccggctctggcaagaccaggaagtacctgcctgccatcgtgcgcgaggccatcaagaggcgcctgcggacactgatcctggcaccaaccagagtggtggcagcagagatggaggaggccctgaagggcctgcccatcagatatcagaccacagccaccaagtccgagcacacaggcagggagatcgtggacctgatgtgccacgccaccttcaccatgaggctgctgtctccagtgcgcgtgcccaactacaatctgatcatcatggatgaggcccacttcacagacccagcctccatcgccgccagaggctatatctctaccagagtgggaatgggagaggctgccgccatctttatgacagccacccctccaggcaccgcagaggcattcccacagagcaacgcacctatccaggatgaggagagggacatcccagagcggagctggaacagcggcaatgagtggatcacagactttgtgggcaagaccgtgtggttcgtgcccagcatcaaggccggcaacgatatcgccaactgcctgaggaagaatggcaagaaagtgatccagctgtcccgcaagacctttgacacagagtaccagaagacccggctgaacgattgggactttctggtgaccacagatatctccgagatgggcgccaatttcaaggccgatagagtgatcgacccacggagatgtctgaagcccgtgatcctgacagacggaccagagagagtgatcctggcaggaccaatgcccgtgaccgcagccagcgccgcacagaggcgcggcagggtgggccgcaacccacagaaggagaatgaccagtatatcttcaccggccagcccctgaacaatgatgaggaccacgcccactggacagaggccaagatgctgctggataacatcaataccccagagggcatcatccccgccctgtttgagcctgagagggagaagagcgccgcaatcgacggagagtacaggctgaagggcgagtcccgcaagacattcgtggagctgatgaggagaggcgatctgcccgtgtggctagcccacaaggtggcctccgagggcatcaagtataccgataggaagtggtgctttgacggcgagcgcaacaatcagatcctggaggagaacatggacgtggagatctggacaaaggagggcgagagaaagaagctgcggccaagatggctggatgcaaggacctacagcgaccccctggccctgaaggagtttaaggacttcgcagcaggaaggaagtccatcgccctggatctggtgaccgagatcggccgggtgccatctcacctggcacacaggacacgcaacgccctggataacctggtcatgctgcacacctccgagcacggcggcagagcctatagacacgccgtggaggagctgcccgagacaatggagacactgctgctgctgggcctgatgatcctgctgacaggcggcgccatgctgttcctgatcagcggcaagggcatcggcaagacctccatcggcctgatctgcgtgatcgtgagcagcggcatgctgtggatggccgacgtgcctctgcagtggatcgccagcgccatcgtgctggagttctttatgatggtgctgctgatccctgagccagagaagcagagaacaccacaggacaaccagctggcctacgtggtcatcggcatcctgaccctggccgcaatcgtggccgccaatgagatgggcctgctggagacaacaaagagggatctgggcatgagcaaggagccaggcgtggtgtcccccacctcttacctggatgtggacctgcaccctgcctccgcctggacactgtatgccgtggccaccacagtgatcaccccaatgctgagacacaccatcgagaactccacagccaacgtgagcctggccgcaatcgcaaaccaggcagtggtgctgatgggcctggacaagggctggccaatctccaagatggacctaggcgtgcccctgctggccctgggctgctactctcaagtgaatccactgacactgaccgcagccgtgctgctgctggtgacccactatgccatcatcggccctggcctgcaggcaaaggcaacacgggaggcacagaagagaaccgcagcaggaatcatgaagaaccccacagtggacggcatcatgaccatcgatctggaccctgtgatctacgatagcaagtttgagaagcagctgggccaggtcatgctgctggtgctgtgcgccgtgcagctgctgctgatgagaacctcttgggcactgtgcgaggccctgaccctggccacaggccctatcaccacactgtgggagggcagcccaggcaagttctggaacaccacaatcgccgtgtctatggccaatatctttaggggcagctacctggcaggcacaggcctggccttctccatcatgaagtctgtgggcaccggcaggcgcggcacaggcagccagggagagacactgggcgagaagtggaagaagaagctgaaccagctgtctagaaaggagtttgacctgtataagaagagcggcatcaccgaggtggatcgcacagaggcaaaggagggcctgaagaggggagagacaacacaccacgccgtgagcaggggctccgccaagctgcagtggttcgtggagcggaatatggtcatccctgagggcagagtgatcgacctgggctgcggcaggggaggatggtcctactattgtgccggcctgaagaaggtgacagaggtgagaggatacaccaagggaggcccaggccacgaggagcccgtgcctatgtccacatacggctggaacatcgtgaagctgatgtctggcaaggacgtgttctacctgccccctgagaagtgcgataccctgctgtgcgacatcggcgagtctagcccatctcccacagtggaggagagcaggaccatccgcgtgctgaagatggtggagccctggctgaagaacaatcagttctgcatcaaggtgctgaatccctacatgcctaccgtgatcgagcacctggagcggctgcagagaaagtatggcggcatgctggtgaggaaccctctgtctcgcaatagcacacacgagatgtattggatcagcaacggcaccggcaatatcgtgtcctctgtgaacatggtgtcccggctgctgctgaatagattcacaatgacccacagacggcccaccatcgagaaggatgtggacctgggcgcaggcacaaggcacgtgaacgccgagccagagacacccaatatggacgtgatcggcgagaggatcaagcgcatcaaggaggagcacagctccacatggcactacgatgacgagaacccatataagacctgggcctaccacggctcctatgaggtgaaggccacaggctctgcctctagcatgatcaatggcgtggtgaagctgctgaccaagccttgggacgtggtgccaatggtgacccagatggccatgacagataccacaccctttggccagcagcgcgtgttcaaggagaaggtggatacacggacccctagaccaatgcccggcacacggaaagtgatggagatcaccgcagagtggctgtggaggacactgggccgcaacaagaagcctcggctgtgcaccagagaggagtttacaaagaaggtgcgcaccaacgcagcaatgggagccgtgttcaccgaggagaatcagtgggatagcgccagagccgcagtggaggacgaggagttctggaagctggtggatcgggagagagagctgcacaagctgggcaagtgcggctcttgcgtgtataacatgatgggcaagagagagaagaagctgggcgagtttggcaaggccaagggcagcagggccatctggtacatgtggctgggcgccaggtacctggagtttgaggccctgggcttcctgaacgaggaccactggttctctcgcgagaattcttacagcggagtggagggagagggcctgcacaagctgggctatatcctgcgggacatcagcaagatccctggcggcgccatgtatgcagatgacaccgcaggatgggatacccgcatcacagaggatgacctgcacaacgaggagaagatcacacagcagatggaccccgagcacagacagctggccaacgccatctttaagctgacctaccagaataaggtggtgaaggtgcagaggcctacaccaaagggcaccgtgatggatatcatcagcaggaaggaccagaggggctccggacaagtgggcacctatggcctgaacacattcaccaatatggaggcacagctggtgcggcagatggagggagagggcgtgctgagcaaggcagacctggagaatccccacctgctggagaagaagatcacacagtggctggagacaaagggcgtggagaggctgaagcgcatggccatctccggcgatgactgcgtggtgaagcctatcgatgacagatttgccaacgccctgctggccctgaatgatatgggcaaggtgaggaaggacatccctcagtggcagccatctaagggctggcacgattggcagcaggtgcctttttgcagccaccacttccacgagctgatcatgaaggacggcaggaagctggtggtgccttgtcgcccacaggatgagctgatcggaagggcccgcatctcccagggagcaggatggagcctgaaggagacagcctgcctgggcaaggcctacgcccagatgtggagcctgatgtatttccacaggcgcgacctgagactggccagcaacgccatctgttccgccgtgcccgtgcactgggtgcctacctctaggaccacatggagcatccacgcccaccaccagtggatgaccacagaggatatgctgacagtgtggaacagagtgtggatcgaggataatccctggatggaggacaagacccctgtgaccacatgggaggacgtgccctacctgggcaagagagaggatcagtggtgtggcagcctgatcggcctgacatccagggccacctgggcacagaatatcctgaccgccatccagcaggtgaggtccctgatcggcgatgaggagttcctggactacatgccatcaatgaagaggtttaggaaggaggaagaatccgagggggctatctggtaaacaaaggaagtaaaaaagagacaaactgtcaggccaccttaagccacagtacggaagaagctgtgcagcctgtgagccccgtccaaggacgttaaaagaagaagtcaggcccaaaagccacggcttgagcaaaccgtgctgcctgtagctccgtcgtggggacgtaaagcctgggaggctgcaaaccgtggaagctgtacgcacggtgtagcagactagcggttagaggagacccctcccatgacacaacgcagcagcggggcccgagcactgagggaagctgtacctccttgcaaaggactagaggttagaggagaccccccgcaaataaaaacagcatattgacgctgggagagaccagagatcctgctgtctcctcagcatcattccaggcacagaacgccagaaaatggaatggtgctgttgaatcaacaggttct

SEQ ID NO: 26 - DNA, 10173 bp, synthetic construct
  source 1..10173: mol_type = other DNA
atgaacaaccaacgaaaaaagacgggaaaaccgtctatcaatatgctgaaacgcgtgagaaaccgtgtgtcaactggctcacagctggccaagcggttctccagaggcctgctgaacggacagggacccatgaagctggtcatggccttcatcgcctttctgcgcttcctggcaatcccacctacagcaggcgtgctggccagatggggcacctttaagaagagcggcgccatcaaggtgctgaagggcttcaagaaggagatctccaacatgctgtctatcatcaataagcgcaagaagaccagcctgtgcctgatgatgatgctgcctgccacactggcctttcacctgaccagccgggacggcgagccaagaatgatcgtgggcaagaacgagcggggcaagtctctgctgttcaagaccgccagcggcatcaatatgtgcaccctgatcgccatggatctgggcgagatgtgcgacgataccgtgacatacaagtgtcctctgatcgccgaggtggagccagaggatatcgactgctggtgtaacctgaccagcacatgggtgacatatggcacctgcaatcaggcaggagagcacaggagagacaagcggagcgtggccctggccccacacgtgggaatgggcctggatacccggacacagacctggatgtctgccgagggagcatggaggcaggtggagaaggtggagacatgggccctgagacaccccgggtttaccatcctggccctgttcctggcccactacatcggcacatctctgacccagaaggtggtcatcttcatcctgctgatgctggtgacccctagcatgacaatgcggtgcgtgggcgtgggcaacagagacttcgtggagggcctgagcggagcaacctgggtggatgtggtgctggagcacggaggatgcgtgaccacaatggccaagaataagcccacactggacatcgagctgcagaagacagaggcaacccagctggccaccctgcgcaagctgtgcatcgagggcaagatcacaaacatcaccacaggctctcggtgtccaacccagggagaggcaatcctgccagaggagcaggaccagaactacgtgtgcaagcacacatatgtggataggggctggggcaatggctgtggcctgtttggcaagggcagcctggtgacctgcgccaagttccagtgtctggagcctatcgagggcaaggtggtgcagtacgagaacctgaagtataccgtgatcatcacagtgcacaccggcgatcagccacaagtgggaaatgacacccagggcgtgacagtggagatcacccctcaggcctccaccgtggaggccgtgctgctggagtacggcacactgggcctgaagtgctctcctagaaccggcctggactttaacgagatgatcctgctgacaatgaagaccaaggcctggatggtgcacaggcagtggttctttgatctgccactgccctggacatctggcgccaccacagagacaccaacctggaaccgcaaggagctgctggtgaccttcaagaatgcccacgccaagaagcaggaggtggtggtgctgggatcccaggagggagcaatgcacacagccctgaccggagccacagagatccagaacagcggcggcacatccatctttgccggccacctgaagtgccggctgaagatggacaagctggagctgaagggcatgtcttacgccatgtgcctgaataccttcgtgctgaagaaggaggtgagcgagacacagcacggcaccatcctgatcaaggtggagtataagggcgaggacgccccctgtaagatcccttttagcaccgaggatggacagggcaaggcacacaacggccgcctgatcacagccaatcctgtggtgaccaagaaggaggagccagtgaacatcgaggccgagccacccttcggcgagtccaatatcgtgatcggcatcggcgacaaggccctgaagatcaactggtacaagaagggcagctccatcggcaagatgtttgaggcaacagccagaggcgcccggaggatggccatcctgggcgataccgcatgggacttcggctccgtgggaggcgtgctgaattctctgggcaagatggtgcaccagatctttggctccgcctataccgccctgttctccggcgtgtcttggatcatgaagatcggcatcggcgtgctgctgacatggatcggcctgaactctaagaatacctccatgtctttcagctgcatcgtgatcggcatcatcaccctgtacctgggcgcagtggtgcaggcagacatgggctgcgtgatcaactggaagggcaaggagctgaagtgtggctctggcatctttgtgacaaatgaggtgcacacatggaccgagcagtataagttccaggcagatagcccaaagcgcctggccaccgcaatcgcaggagcatgggagaacggcgtgtgcggcatccggtccaccacaagaatggagaatctgctgtggaagcagatcgccaacgagctgaattacatcctgtgggagaacaatatcaagctgaccgtggtggtgggcgacatcatcggcgtgctggagcagggcaagagaacactgacccctcagccaatggagctgaagtatagctggaagacatggggcaaggccaagatcgtgaccgccgagacacagaactctagcttcatcatcgacggccccaatacccctgagtgcccatccgcctctagggcctggaacgtgtgggaggtggaggattacggctttggcgtgttcaccacaaatatctggctgaagctgagagaggtgtacacccagagctgtgatcacaggctgatgtccgccgccatcaaggatgagagggccgtgcacgcagacatgggatactggatcgagagccagaagaacggctcctggaagctggagaaggcctcctttatcgaggtgaagacatgcacctggcccaagtctcacaccctgtggagcaacggcgtgctggagtctgacatgatcatcccaaagtccctggccggccccatctctcagcacaatcacaggcccggctaccacacacagaccgcaggaccttggcacctgggcaagctggagctggatttcaactattgcgagggcaccacagtggtcatcacagagaattgtggcaccaggggcccatctctgcgcaccacaaccgtgagcggcaagctgatccacgagtggtgctgtcggtcctgcaccctgcctccactgagatacatgggcgaggacggctgttggtatggcatggagatccgccccatcaacgagaaggaggagaatatggtgaagagcctggtgtccgccggctctggcaaggtggataacttcaccatgggcgtgctgtgcctggccatcctgtttgaggaagtgatgcggggcaagttcggcaagaagcacatgatcgccggcgtgctgttcacctttgtgctgctgctgagcggccagatcacatggagagacatggcccacaccctgatcatgatcggcagcaatgcctccgataggatgggcatgggcgtgacatacctggccctgatcgccacctttaagatccagccattcctggccctgggcttctttctgcggaagctgacctccagagagaacctgctgctgggcgtgggcctggccatggcaacaaccctgcagctgcccgaggacatcgagcagatggccaatggcatcgccctgggcctgatgacactgaagctgatcacacagtttgagacatatcagctgtggaccgccctggtgtctctgacatgcagcaacaccatcttcacactgaccgtggcatggcgcacagccaccctgatcctggcaggcgtgagcctgctgccactgtgccagtcctctagcatgcggaagacagactggctgcctatgaccgtggcagcaatgggcgtgccccctctgccactgttcatctttagcctgaaggatacccctaagcggagatcctggccactgaacgagggcgtgatggcagtgggcctggtgtccatcctggcctcctctctgctgagaaatgacgtgccaatggcaggacccctggtggcaggaggcctgctgatcgcctgctacgtgatcacaggcaccagcgccgatctgaccgtggagaaggcagcagacgtgacatgggaggaggaggcagagcagaccggcgtgtcccacaacctgatgatcacagtggacgatgacggcaccatgaggatcaaggatgacgagacagagaatatcctgaccgtgctgctgaagacagccctgctgatcgtgagcggcatcttcccttactccatcccagccaccctgctggtgtggcacacctggcagaagcagacacagcggagcggcgtgctgtgggacgtgccaagcccaccagagacacagaaggccgagctggaggagggcgtgtatcggatcaagcagcagggcatctttggcaagacccaagtgggagtgggcgtgcagaaggagggcgtgttccacaccatgtggcacgtgacacggggcgccgtgctgacccacaacggcaagagactggagccaaattgggcctccgtgaagaaggacctgatctcttacggcggaggatggcggctgagcgcccagtggcagaagggagaggaggtgcaggtcatcgcagtggagcccggcaagaaccctaagaattttcagaccatgcctggcatcttccagacaaccacaggagagatcggagcaattgccctggacttcaagcccggcacaagcggctcccctatcatcaacagggagggcaaggtggtgggcctgtacggcaacggcgtggtgaccaagaatggcggctacgtgagcggcatcgcacagacaaacgcagagcctgacggaccaacccctgagctggaggaggagatgttcaagaagcggaatctgacaatcatggatctgcaccccggctctggcaagaccaggaagtacctgcctgccatcgtgcgcgaggccatcaagaggcgcctgcggacactgatcctggcaccaaccagagtggtggcagcagagatggaggaggccctgaagggcctgcccatcagatatcagaccacagccaccaagtccgagcacacaggcagggagatcgtggacctgatgtgccacgccaccttcaccatgaggctgctgtctccagtgcgcgtgcccaactacaatctgatcatcatggatgaggcccacttcacagacccagcctccatcgccgccagaggctatatctctaccagagtgggaatgggagaggctgccgccatctttatgacagccacccctccaggcaccgcagaggcattcccacagagcaacgcacctatccaggatgaggagagggacatcccagagcggagctggaacagcggcaatgagtggatcacagactttgtgggcaagaccgtgtggttcgtgcccagcatcaaggccggcaacgatatcgccaactgcctgaggaagaatggcaagaaagtgatccagctgtcccgcaagacctttgacacagagtaccagaagacccggctgaacgattgggactttctggtgaccacagatatctccgagatgggcgccaatttcaaggccgatagagtgatcgacccacggagatgtctgaagcccgtgatcctgacagacggaccagagagagtgatcctggcaggaccaatgcccgtgaccgcagccagcgccgcacagaggcgcggcagggtgggccgcaacccacagaaggagaatgaccagtatatcttcaccggccagcccctgaacaatgatgaggaccacgcccactggacagaggccaagatgctgctggataacatcaataccccagagggcatcatccccgccctgtttgagcctgagagggagaagagcgccgcaatcgacggagagtacaggctgaagggcgagtcccgcaagacattcgtggagctgatgaggagaggcgatctgcccgtgtggctagcccacaaggtggcctccgagggcatcaagtataccgataggaagtggtgctttgacggcgagcgcaacaatcagatcctggaggagaacatggacgtggagatctggacaaaggagggcgagagaaagaagctgcggccaagatggctggatgcaaggacctacagcgaccccctggccctgaaggagtttaaggacttcgcagcaggaaggaagtccatcgccctggatctggtgaccgagatcggccgggtgccatctcacctggcacacaggacacgcaacgccctggataacctggtcatgctgcacacctccgagcacggcggcagagcctatagacacgccgtggaggagctgcccgagacaatggagacactgctgctgctgggcctgatgatcctgctgacaggcggcgccatgctgttcctgatcagcggcaagggcatcggcaagacctccatcggcctgatctgcgtgatcgtgagcagcggcatgctgtggatggccgacgtgcctctgcagtggatcgccagcgccatcgtgctggagttctttatgatggtgctgctgatccctgagccagagaagcagagaacaccacaggacaaccagctggcctacgtggtcatcggcatcctgaccctggccgcaatcgtggccgccaatgagatgggcctgctggagacaacaaagagggatctgggcatgagcaaggagccaggcgtggtgtcccccacctcttacctggatgtggacctgcaccctgcctccgcctggacactgtatgccgtggccaccacagtgatcaccccaatgctgagacacaccatcgagaactccacagccaacgtgagcctggccgcaatcgcaaaccaggcagtggtgctgatgggcctggacaagggctggccaatctccaagatggacctaggcgtgcccctgctggccctgggctgctactctcaagtgaatccactgacactgaccgcagccgtgctgctgctggtgacccactatgccatcatcggccctggcctgcaggcaaaggcaacacgggaggcacagaagagaaccgcagcaggaatcatgaagaaccccacagtggacggcatcatgaccatcgatctggaccctgtgatctacgatagcaagtttgagaagcagctgggccaggtcatgctgctggtgctgtgcgccgtgcagctgctgctgatgagaacctcttgggcactgtgcgaggccctgaccctggccacaggccctatcaccacactgtgggagggcagcccaggcaagttctggaacaccacaatcgccgtgtctatggccaatatctttaggggcagctacctggcaggcacaggcctggccttctccatcatgaagtctgtgggcaccggcaggcgcggcacaggcagccagggagagacactgggcgagaagtggaagaagaagctgaaccagctgtctagaaaggagtttgacctgtataagaagagcggcatcaccgaggtggatcgcacagaggcaaaggagggcctgaagaggggagagacaacacaccacgccgtgagcaggggctccgccaagctgcagtggttcgtggagcggaatatggtcatccctgagggcagagtgatcgacctgggctgcggcaggggaggatggtcctactattgtgccggcctgaagaaggtgacagaggtgagaggatacaccaagggaggcccaggccacgaggagcccgtgcctatgtccacatacggctggaacatcgtgaagctgatgtctggcaaggacgtgttctacctgccccctgagaagtgcgataccctgctgtgcgacatcggcgagtctagcccatctcccacagtggaggagagcaggaccatccgcgtgctgaagatggtggagccctggctgaagaacaatcagttctgcatcaaggtgctgaatccctacatgcctaccgtgatcgagcacctggagcggctgcagagaaagtatggcggcatgctggtgaggaaccctctgtctcgcaatagcacacacgagatgtattggatcagcaacggcaccggcaatatcgtgtcctctgtgaacatggtgtcccggctgctgctgaatagattcacaatgacccacagacggcccaccatcgagaaggatgtggacctgggcgcaggcacaaggcacgtgaacgccgagccagagacacccaatatggacgtgatcggcgagaggatcaagcgcatcaaggaggagcacagctccacatggcactacgatgacgagaacccatataagacctgggcctaccacggctcctatgaggtgaaggccacaggctctgcctctagcatgatcaatggcgtggtgaagctgctgaccaagccttgggacgtggtgccaatggtgacccagatggccatgacagataccacaccctttggccagcagcgcgtgttcaaggagaaggtggatacacggacccctagaccaatgcccggcacacggaaagtgatggagatcaccgcagagtggctgtggaggacactgggccgcaacaagaagcctcggctgtgcaccagagaggagtttacaaagaaggtgcgcaccaacgcagcaatgggagccgtgttcaccgaggagaatcagtgggatagcgccagagccgcagtggaggacgaggagttctggaagctggtggatcgggagagagagctgcacaagctgggcaagtgcggctcttgcgtgtataacatgatgggcaagagagagaagaagctgggcgagtttggcaaggccaagggcagcagggccatctggtacatgtggctgggcgccaggtacctggagtttgaggccctgggcttcctgaacgaggaccactggttctctcgcgagaattcttacagcggagtggagggagagggcctgcacaagctgggctatatcctgcgggacatcagcaagatccctggcggcgccatgtatgcagatgacaccgcaggatgggatacccgcatcacagaggatgacctgcacaacgaggagaagatcacacagcagatggaccccgagcacagacagctggccaacgccatctttaagctgacctaccagaataaggtggtgaaggtgcagaggcctacaccaaagggcaccgtgatggatatcatcagcaggaaggaccagaggggctccggacaagtgggcacctatggcctgaacacattcaccaatatggaggcacagctggtgcggcagatggagggagagggcgtgctgagcaaggcagacctggagaatccccacctgctggagaagaagatcacacagtggctggagacaaagggcgtggagaggctgaagcgcatggccatctccggcgatgactgcgtggtgaagcctatcgatgacagatttgccaacgccctgctggccctgaatgatatgggcaaggtgaggaaggacatccctcagtggcagccatctaagggctggcacgattggcagcaggtgcctttttgcagccaccacttccacgagctgatcatgaaggacggcaggaagctggtggtgccttgtcgcccacaggatgagctgatcggaagggcccgcatctcccagggagcaggatggagcctgaaggagacagcctgcctgggcaaggcctacgcccagatgtggagcctgatgtatttccacaggcgcgacctgagactggccagcaacgccatctgttccgccgtgcccgtgcactgggtgcctacctctaggaccacatggagcatccacgcccaccaccagtggatgaccacagaggatatgctgacagtgtggaacagagtgtggatcgaggataatccctggatggaggacaagacccctgtgaccacatgggaggacgtgccctacctgggcaagagagaggatcagtggtgtggcagcctgatcggcctgacatccagggccacctgggcacagaatatcctgaccgccatccagcaggtgaggtccctgatcggcgatgaggagttcctggactacatgccatcaatgaagaggtttaggaaggaggaagaatccgagggggctatctggtaa

SEQ ID NO: 27 - DNA, 10653 bp, synthetic construct
  source 1..10653: mol_type = other DNA
agttgttagtctgtgtggaccgacaaggacagttccaaatcggaagcttgcttaacacagttctaacagtttgttttaaatagagagcagatctctggaaaaatgaaccaacgaaaaaaggtggttagaccacctttcaatatgctgaaacgcgagagaaaccgcgtatcaacccctcaagggttggtgaagagattctcaaccggacttttctccgggaaaggacccttacggatggtgcttgcattcatcacatttttgcgagttctttccatcccgccaacagcagggattctgaaaagatggggacagttgaaaaagaataaggccatcaagatactgattggattcaggaaggagataggtcgcatgttaaacatcttgaataggagaagaaggtcaacaatgacattgctgtgtttgattcccaccgtaatggcgttccacttgtcaacaagagacggcgaacccctcatgatagtggcaaaacacgaaagggggagacctctcttgtttaagacaacagaaggaatcaacaaatgcaccctcattgccatggacctaggtgaaatgtgtgaagacactgtcacgtataaatgtcctctactggttaacaccgaacctgaagacattgattgctggtgcaatctcacgtccacttgggtcatgtacgggacatgcacccagagcggagaacggaggcgagagaagcgctcagtagccctaacaccacattcaggaatgggattggaaacaagagctgagacatggatgtcatcggaaggggcttggaaacatgctcagagagtggaaagctggatactcagaaacccaggattcgcgctcctggcaggatttatggcttacatgattgggcaaacaggaatccagcgaactgttttctttgtcctaatgatgctagtcgccccatcttacggaatgcgatgcgtgggggtagggaacagagactttgtggaaggagtttcgggtggggcatgggtcgacctggtgctagaacatggaggatgcgttacaaccatggcccagggaaaaccaaccttggattttgagctgaccaagacaacagctaaggaagtggctctgctaagaacctattgcattgaagcttcaatatcaaacataaccacggcaacaagatgtccaacgcaaggagagccttatctcaaagaggaacaagaccaacagtacatttgccggagagatgtggtagatagagggtggggcaatggctgtggcttgtttggaaaaggaggagttgtgacatgtgcgaagtttttatgctcggggaagataacaggcaatctggtccaaattgaaaaccttgaatatacggtagttgtgacagtccacaatggagacacccatgcagtaggaaatgacacatccaatcatggagtgacagccacgataactcctaggtcaccatcggtagaagtcaaattgccggactatggagaactaacactcgattgtgaacccaggtctggaattgatttcaatgagatgatcctgatgaaaatgaaaaagaaaacgtggcttgtgcacaagcaatggtttttggacctacctctaccatggtcagcaggagcagacacatcagaagttcattggaattacaaagagagaatggtgacattcaaagttcctcatgccaagagacaggatgtgacagtactaggatctcaggagggagctatgcattctgccctcgccggagccacagaagtggattctggtgatggaaaccacatgtttgcaggacatcttaagtgcaaggttcgtatggagaaattgagaattaagggaatgtcatacacgatgtgttcaggaaagttctcaattgacaaagagatggcagaaacacagcatgggacaacagtggtgaaagtcaagtacgaaggcgctggagctccgtgtaaagtccccatagagataagagatgtgaacaaggaaaaagtagttgggcgcatcatctcatccaccccttttgctgagaataccaacagcgtaaccaacatagaattagaacccccttttggggacagctacatagtgataggtgttggagacagtgcattaacactccattggttcaggaaagggagctccattggcaagatgtttgagtccacatacagaggtgcaaaacgaatggccattctaggtgaaacagcttgggattttggttctgttggtggactgttcacatcactgggaaaggctgtacaccaagtttttgggagtgtgtatacaaccatgtttggaggggtctcatggatgattagaatcctaattgggttcttagtattgtggattggcacgaattcaagaaatacttcaatggcaatgacgtgcatagctgttggaggaatcactctgtttctaggtttcacagttcaagcagacatgggttgtgtggtgtcatggaatgggaaggaactaaaatgtggaagcggaatctttgtggttgacaacgtgcacacttggacagaacagtacaaattccaaccagagtccccagcgaggctagcgtctgcaatattgaatgcccacaaagatggggtctgtggaatcagatcaaccacgaggctggaaaatgttatgtggaagcaaataaccaacgagctaaactatgttctctgggaaggaggacatgacctcactgtagtggctggggacgtgaaaggggtgttgaccaaaggcaagagagcactcacacctccagtgaatgatttgaaatattcatggaagacatggggaaaagcaaaaatctttaccccagaagcaagaaatagcacatttttaatagacggaccagacacctccgaatgccccaatggacgaagagcatggaactttttggaggtagaagactatggatttggcatgtttacgaccaacatatggatgaaattccgagaaggaagctcagaagtgtgtgaccatagattaatgtcggcggcaatcaaagatcagaaagctgtgcatgctgacatgggttattggatagagagctcaaaaaaccagacctggcaaatagagaaagcatctcttattgaagtgaaaacatgcctgtggcccaaaacccacacgctgtggagcaatggagtgctggaaagtcagatgctcattccaagatcatatgcaggccctttttcacagcacaattaccgccagggctatgccacgcaaaccgcgggcccatggcacttaggcaaattggagatagactttggagaatgtcccggaacaacagtcacaattcaggaggattgtgaccatagaggcccatctttgcgtacgaccactgcatctggaaaactggtcacgcagtggtgttgccgctcctgcacgatgcctcccttaaggttcttgggagaagatggatgttggtacgggatggagattaggcccttgagtgaaaaagaagagaacatggtcaaatcacaggtaacagccggacagggcacatcagaaactttttctatggggctgctatgcctgaccttgttcgtggaagaatgcttaaggagaagagtcactaggaaatacatgatgttggttgtggtaatcaccttctgtgctatcatcctaggaggtctcacatggatggacttactacgagcccttatcatgttaggggacactatgtctggcagaataggaggacagattcacctagccatcatggcagtgttcaagatgtcaccaggatatgtgttgggtgtgtttttaaggaaacttacttcaagagagacagcgctaatggtaataggaatggccatgacaactgtgttttcaattccacatgacctcatggaactcattgatggaatatcattggggttgatattactaagaatagtaacacactttgataacacccaagtgggaaccttagccctttccctgactttcataagatcaacaacaccattggtcatggcttggaggaccatcatggctgtgttctttgtggttacactcattcctttgtgcagaacaagctgtcttcaaaaacagtcccattgggtagaaataacagcacttatcttaggggcccaggctttgccagtgtacctaatgaccctcatgaaaggagcctcaagaagatcttggcctcttaatgagggcataatggctgtgggtttggtgagcctcttgggaagcgccctcctaaagaatgatgttcctttagccggcccaatggtggcaggaggcttgcttctagcggcttacgtaatgagtggcagctcagcagacctgtcactagagaaggctgctaatgtgcaatgggatgaaatggcggacataactggctcaagcccaatcatagaagtgaaacaggatgaagatggctctttctccatacgggacgtcgaggaaaccaacatgataaccctcttggtgaaactggcgctgataacagtatcaggtctttaccccttggcaattccagtcacaatggcactatggtatatttggcaagtgaaaacacaaagatcaggagctctgtgggacgtcccctcacccgctgccactcagaaagccacactgtctgaaggggtgtataggatcatgcaaagagggttgttcgggaaaactcaggttggagtagggatacacatggaaggtgtatttcacacaatgtggcatgtaacaagaggatcagtgatctgccatgagacagggagattagagccatcttgggccgacgtcaggaatgacatgatatcatacggtgggggatggaggctcggagacaaatgggacaaagaagaagatgttcaggtcctagccatagaaccaggaaaaaatcccaaacatgtccaaacgaaaccaggccttttcaagaccctaactggagaaatcggagcagtaactctggatttcaaacccggtacctctggctctcccatcataaacaagaaagggaaagttatcggactctatggaaatggagtagttaccaaatcaggtgattacgttagtgccataacgcaagccgaaagaattggtgagccagattatgaagtggatgaggacatttttcgaaagaaaagattaactataatggacttacaccccggagccggaaagacaaaaagaattctcccatcaatagtcagagaagctttgaaaaggaggctgcgcaccttgattttggcccccacgagagtggtggcggccgagatggaagaggccttacgcggactgccaatccgttatcagaccccggctgtgaaatcagagcacacaggaagagagattgtagacctcatgtgtcatgcaaccttcacaacgagacttttgtcatcaaccagggttccaaattataacctcatagtgatggatgaagcacattttactgacccttgtagtgtcgcagctagaggatacatttcaaccagggtggaaatgggagaggcagcagctatcttcatgactgcaacccctcctggatcaatagatcccttcccccagagcaacagcccaatagaagacatcgagagggaaatcccagaaaggtcatggaacacagggttcgactggataacagactaccaaggaaaaactgtgtggtttgttcccagcataaaagctggaaatgacattgcaaattgtttgagaaagtcgggaaagagagtgatccagttgagcagaaaaacctttgacacagagtatccaaagacgaaactcacggattgggattttgtggttaccacagacatatctgaaatgggagctaatttcagagccgggagagtgatagaccccaggagatgcctcaagccagttatcctaacagatgggccagagagagttattctagcaggtccaattccagtaactccagcaagtgccgctcagagaagagggcgaataggtaggaatccagcacaagaagatgaccaatatgttttctccggagacccactaaagaatgatgaagatcatgcccactggacagaagcaaagatgttgcttgacaatatctacactcctgaagggataattccaacattgtttggtccggaaagggaaaaaacccaagccattgatggagagtttcgcctcagaggggaacaaaggaagacatttgtggaactgatgaggagaggggaccttccggtgtggctgagctacaaggtagcttctgccggtatctcttataaagaccgagaatggtgctttacaggggaaaggaataaccaaattttagaagaaaacatggaggttgaaatctggactagagagggagaaaagaaaaagctaaggccaaaatggttagatgcacgtgtgtacgctgaccccatggctttgaaggatttcaaggagtttgccagtggaagaaagagcataactcttgacatcctaacagagattgctactttgccaacttacctttcctctaaggccaagctagcccttgacaacatagtcatgctccacacaacagaaaaaggagggagggcctaccaacacgccctgaatgaactcccggagtcactggaaacactcatgcttgtagccctactaggtgctttgacagccggtatcttcctgtttttcatgcaggggaaaggaatagggaaattgtcaatgggtctgatagccatagctgtggccagtggcttgctctgggtagcagaaattcagccccagtggatagcagcttcaatcatactggagttttttcttatggtgctgttgataccagaaccagaaaaacaaaggaccccacaagacaatcaactgatctacgttatattgaccattctcaccattattggtctcatagcagccaatgagatggggctgattgaaaaaacaaaaacggactttgggttctaccaggtaaaaacagaaaccaccattctcgatgtggatttgagaccagcctcagcatggacactctacgcagtggctaccactattctgactcccatgctgagacacaccatagagaacacgtctgccaacctatctttggcagccattgccaaccaagcagctgtcctaatgggacttgggaaaggatggccgctccacagaatggacctcggcgtgccgctgctagcaatgggatgttattctcaagtgaacccaacaaccctgacagcatccctagtcatgcttttagtccattatgccataataggtccaggattacaggcaaaagccactagagaggcccagaaaaggacagctgctgggatcatgaaaaaccccacggtggacgggataacagtaatagatctagaaccaatatcctatgacccaaaatttgaaaagcaattagggcaagtcatgctactagtcctgtgtgttggacaattacttttaatgagaacaacatgggctctctgtgaagtattgactctggccacaggaccaatcatgaccttgtgggagggcaacccgggaagattttggaacacaaccatagcagtatccacagccaatatttttagaggaagctacttggcgggagctggactagctttttcgctcataaaaaatgcacaaacccctaggaggggaactgggaccacaggagagacactgggagagaagtggaagagacagctgaactcattagacagaaaagagtttgaagagtacaaaagaagtggaatactagaagtggacaggactgaagccaagtctgccctaagagatggatctaaaatcaagcacgcggtgtccagagggtctagtaagatcagatggattgttgaaagaggaatgataaaaccaaaaggaaaggtcgtagatcttggttgcgggaggggaggatggtcctattacatggcgacactcaagaacgtgactgaagtgaaaggatatactaaaggaggtccaggacatgaagaaccaatccccatggctacttatggctggaatttggtcaaactccattcaggggttgatgtgttctacaaacccactgagcaggtggacaccctgctatgtgacattggagagtcatcctctaatccgacaatagaggaaggaagaacattgagagtcttaaagatggtggagccatggctctcttcaaaacctgagttctgcatcaaagtcctcaacccctacatgccgacagttatagaagagctggagaaactgcagagaagacatggtggaagcctcgtcagatgcccgctatccaggaattctacccatgagatgtattgggtgtcaggtgcgtcgggaaacatcgtgagttctgtgaacacaatatcaaagatgctgttgaacaggttcacaacaaggcataggaaacccacttatgagaaggacgtagatcttggggcaggaacgagaagtgtctccactgaaacagaaaaaccagacatgacaatcattgggagaaggcttcagagattgcgagaagagcacaaagaaacctggcactatgaccaggaaaacccatacagaacctgggcgtatcatgggagctatgaagctccttcgacaggctcagcatcctccatggtgaacggggtagtaaaactgctgacaaaaccctgggatgtgattccaatggtgactcagttggccatgacagacacaaccccttttgggcaacaaagagtgttcaaggagaaggtggataccagaacaccacaaccaaaacccggcacacgaatgattatgaccatgacagccaattggttatgggccctcctcgggaagaagaaaagtcccagactgtgcacaagggaagagttcatctcaaaagttaggtcaaatgcagccataggcgcagtctttcaggaagaacagggatggacatcagccagtgaagctgtgaatgacagccggttctgggaactggttgacaaagaaagggctctgcaccaggaaggaaaatgtgaatcgtgtgtctataacatgatgggaaaacgtgagaaaaaattaggagagtttggtagggccaagggaagccgagcaatctggtacatgtggctgggggcgcggttcctggaatttgaagccctgggttttttgaacgaagatcactggtttagcagagaaaactcatggagtggagtggaaggggaaggtctgcatagattgggatacatcttggaggacatagacaagaaggatggagacctgatatatgctgacgacacagcaggctgggacacgagaatcactgaagatgaccttttaaatgaagaactgatcacagaacagatggcccctcaccacaagaccctagccaaagccattttcaaactaacctatcaaaacaaagtggtgaaagtcctcagacccacaccgaaaggagcggtaatggacatcatatccaggaaagaccaaagaggtagtggacaggttggaacatatggtttaaatacattcactaacatggaagtccaactcatccgccaaatggaagctgaaggagtcatcacacaagacgacatgcagaacccaagagggttgaaagaaagagttgagaaatggctgaaagagtgtggcgtcgacaggttgaagaggatggcaatcagtggagatgattgcgtggtgaagcccatagatgagaggtttagcacctccctcctcttcttgaatgacatgggaaaggtgaggaaagacatcccgcaatgggaaccatccaagggatggaaaaattggcaagaggttcctttctgctcccaccatttccacaagatcttcatgaaagatggccgctcactggttgttccatgcagaaaccaggatgaactgataggaagagccagaatctcgcagggggctggatggagcttgagagaaacagcctgtctgggcaaagcttatgcccagatgtggtcgcttatgtatttccatagaagggacctgcgcctagcctccatggccatatgctcagcggttccaacagaatggtttccaacaagcagaacaacatggtcaatccatgctcatcaccagtggatgaccactgaagatatgcttaaagtgtggaacagagtgtggatagaagataaccccaatatgactgacaagactccagtccattcgtgggaagacataccttacctagggaaaagagaggatctgtggtgtggatccctgattggactttcctctagagcaacctgggcgaagaacattcacacggccataacccaggtcaggaatctgatcggaaaagaggaatacgtggattacatgccagccatgaaaagatacagcgctcctttcgagagtgaaggagttctgtaattattgacaacaaacaccaaagagaccattgaagtcaggccacttgtgccacggcttgagcaaaccgtgctgcctgtagctccgccaataatgggaggcgtaaaattcccagggaggccatgcgccacggaagctgtacgcgtggcatattggactagcggttagaggagacccctcccatcactgacaaaacgcagcaaaaaagggggcccgaagccaggaggaagctgtacttctggtggaaggactagaggttagaggagacccccccaacacaaaaacagcatattgacgctgggaaagaccagagatcctgctgtctctgcaacatcaatccaggcacagagcgccacgagatggattggtgttgttgaatcaacaggttct

SEQ ID NO: 28 - DNA, 10164 bp, synthetic construct
  source 1..10164: mol_type = other DNA
atgaaccaacgaaaaaaggtggttagaccacctttcaatatgctgaaacgcgagagaaaccgcgtatcaacccctcaagggttggtgaagagattctcaaccggacttttctccgggaaaggacccttacggatggtgcttgcattcatcacatttttgcgagttctttccatcccgccaacagcagggattctgaaaagatggggacagttgaaaaagaataaggccatcaagatactgattggattcaggaaggagataggtcgcatgttaaacatcttgaataggagaagaaggtcaacaatgacattgctgtgtttgattcccaccgtaatggcgttccacttgtcaacaagagacggcgaacccctcatgatagtggcaaaacacgaaagggggagacctctcttgtttaagacaacagaaggaatcaacaaatgcaccctcattgccatggacctaggtgaaatgtgtgaagacactgtcacgtataaatgtcctctactggttaacaccgaacctgaagacattgattgctggtgcaatctcacgtccacttgggtcatgtacgggacatgcacccagagcggagaacggaggcgagagaagcgctcagtagccctaacaccacattcaggaatgggattggaaacaagagctgagacatggatgtcatcggaaggggcttggaaacatgctcagagagtggaaagctggatactcagaaacccaggattcgcgctcctggcaggatttatggcttacatgattgggcaaacaggaatccagcgaactgttttctttgtcctaatgatgctagtcgccccatcttacggaatgcgatgcgtgggggtagggaacagagactttgtggaaggagtttcgggtggggcatgggtcgacctggtgctagaacatggaggatgcgttacaaccatggcccagggaaaaccaaccttggattttgagctgaccaagacaacagctaaggaagtggctctgctaagaacctattgcattgaagcttcaatatcaaacataaccacggcaacaagatgtccaacgcaaggagagccttatctcaaagaggaacaagaccaacagtacatttgccggagagatgtggtagatagagggtggggcaatggctgtggcttgtttggaaaaggaggagttgtgacatgtgcgaagtttttatgctcggggaagataacaggcaatctggtccaaattgaaaaccttgaatatacggtagttgtgacagtccacaatggagacacccatgcagtaggaaatgacacatccaatcatggagtgacagccacgataactcctaggtcaccatcggtagaagtcaaattgccggactatggagaactaacactcgattgtgaacccaggtctggaattgatttcaatgagatgatcctgatgaaaatgaaaaagaaaacgtggcttgtgcacaagcaatggtttttggacctacctctaccatggtcagcaggagcagacacatcagaagttcattggaattacaaagagagaatggtgacattcaaagttcctcatgccaagagacaggatgtgacagtactaggatctcaggagggagctatgcattctgccctcgccggagccacagaagtggattctggtgatggaaaccacatgtttgcaggacatcttaagtgcaaggttcgtatggagaaattgagaattaagggaatgtcatacacgatgtgttcaggaaagttctcaattgacaaagagatggcagaaacacagcatgggacaacagtggtgaaagtcaagtacgaaggcgctggagctccgtgtaaagtccccatagagataagagatgtgaacaaggaaaaagtagttgggcgcatcatctcatccaccccttttgctgagaataccaacagcgtaaccaacatagaattagaacccccttttggggacagctacatagtgataggtgttggagacagtgcattaacactccattggttcaggaaagggagctccattggcaagatgtttgagtccacatacagaggtgcaaaacgaatggccattctaggtgaaacagcttgggattttggttctgttggtggactgttcacatcactgggaaaggctgtacaccaagtttttgggagtgtgtatacaaccatgtttggaggggtctcatggatgattagaatcctaattgggttcttagtattgtggattggcacgaattcaagaaatacttcaatggcaatgacgtgcatagctgttggaggaatcactctgtttctaggtttcacagttcaagcagacatgggttgtgtggtgtcatggaatgggaaggaactaaaatgtggaagcggaatctttgtggttgacaacgtgcacacttggacagaacagtacaaattccaaccagagtccccagcgaggctagcgtctgcaatattgaatgcccacaaagatggggtctgtggaatcagatcaaccacgaggctggaaaatgttatgtggaagcaaataaccaacgagctaaactatgttctctgggaaggaggacatgacctcactgtagtggctggggacgtgaaaggggtgttgaccaaaggcaagagagcactcacacctccagtgaatgatttgaaatattcatggaagacatggggaaaagcaaaaatctttaccccagaagcaagaaatagcacatttttaatagacggaccagacacctccgaatgccccaatggacgaagagcatggaactttttggaggtagaagactatggatttggcatgtttacgaccaacatatggatgaaattccgagaaggaagctcagaagtgtgtgaccatagattaatgtcggcggcaatcaaagatcagaaagctgtgcatgctgacatgggttattggatagagagctcaaaaaaccagacctggcaaatagagaaagcatctcttattgaagtgaaaacatgcctgtggcccaaaacccacacgctgtggagcaatggagtgctggaaagtcagatgctcattccaagatcatatgcaggccctttttcacagcacaattaccgccagggctatgccacgcaaaccgcgggcccatggcacttaggcaaattggagatagactttggagaatgtcccggaacaacagtcacaattcaggaggattgtgaccatagaggcccatctttgcgtacgaccactgcatctggaaaactggtcacgcagtggtgttgccgctcctgcacgatgcctcccttaaggttcttgggagaagatggatgttggtacgggatggagattaggcccttgagtgaaaaagaagagaacatggtcaaatcacaggtaacagccggacagggcacatcagaaactttttctatggggctgctatgcctgaccttgttcgtggaagaatgcttaaggagaagagtcactaggaaatacatgatgttggttgtggtaatcaccttctgtgctatcatcctaggaggtctcacatggatggacttactacgagcccttatcatgttaggggacactatgtctggcagaataggaggacagattcacctagccatcatggcagtgttcaagatgtcaccaggatatgtgttgggtgtgtttttaaggaaacttacttcaagagagacagcgctaatggtaataggaatggccatgacaactgtgttttcaattccacatgacctcatggaactcattgatggaatatcattggggttgatattactaagaatagtaacacactttgataacacccaagtgggaaccttagccctttccctgactttcataagatcaacaacaccattggtcatggcttggaggaccatcatggctgtgttctttgtggttacactcattcctttgtgcagaacaagctgtcttcaaaaacagtcccattgggtagaaataacagcacttatcttaggggcccaggctttgccagtgtacctaatgaccctcatgaaaggagcctcaagaagatcttggcctcttaatgagggcataatggctgtgggtttggtgagcctcttgggaagcgccctcctaaagaatgatgttcctttagccggcccaatggtggcaggaggcttgcttctagcggcttacgtaatgagtggcagctcagcagacctgtcactagagaaggctgctaatgtgcaatgggatgaaatggcggacataactggctcaagcccaatcatagaagtgaaacaggatgaagatggctctttctccatacgggacgtcgaggaaaccaacatgataaccctcttggtgaaactggcgctgataacagtatcaggtctttaccccttggcaattccagtcacaatggcactatggtatatttggcaagtgaaaacacaaagatcaggagctctgtgggacgtcccctcacccgctgccactcagaaagccacactgtctgaaggggtgtataggatcatgcaaagagggttgttcgggaaaactcaggttggagtagggatacacatggaaggtgtatttcacacaatgtggcatgtaacaagaggatcagtgatctgccatgagacagggagattagagccatcttgggccgacgtcaggaatgacatgatatcatacggtgggggatggaggctcggagacaaatgggacaaagaagaagatgttcaggtcctagccatagaaccaggaaaaaatcccaaacatgtccaaacgaaaccaggccttttcaagaccctaactggagaaatcggagcagtaactctggatttcaaacccggtacctctggctctcccatcataaacaagaaagggaaagttatcggactctatggaaatggagtagttaccaaatcaggtgattacgttagtgccataacgcaagccgaaagaattggtgagccagattatgaagtggatgaggacatttttcgaaagaaaagattaactataatggacttacaccccggagccggaaagacaaaaagaattctcccatcaatagtcagagaagctttgaaaaggaggctgcgcaccttgattttggcccccacgagagtggtggcggccgagatggaagaggccttacgcggactgccaatccgttatcagaccccggctgtgaaatcagagcacacaggaagagagattgtagacctcatgtgtcatgcaaccttcacaacgagacttttgtcatcaaccagggttccaaattataacctcatagtgatggatgaagcacattttactgacccttgtagtgtcgcagctagaggatacatttcaaccagggtggaaatgggagaggcagcagctatcttcatgactgcaacccctcctggatcaatagatcccttcccccagagcaacagcccaatagaagacatcgagagggaaatcccagaaaggtcatggaacacagggttcgactggataacagactaccaaggaaaaactgtgtggtttgttcccagcataaaagctggaaatgacattgcaaattgtttgagaaagtcgggaaagagagtgatccagttgagcagaaaaacctttgacacagagtatccaaagacgaaactcacggattgggattttgtggttaccacagacatatctgaaatgggagctaatttcagagccgggagagtgatagaccccaggagatgcctcaagccagttatcctaacagatgggccagagagagttattctagcaggtccaattccagtaactccagcaagtgccgctcagagaagagggcgaataggtaggaatccagcacaagaagatgaccaatatgttttctccggagacccactaaagaatgatgaagatcatgcccactggacagaagcaaagatgttgcttgacaatatctacactcctgaagggataattccaacattgtttggtccggaaagggaaaaaacccaagccattgatggagagtttcgcctcagaggggaacaaaggaagacatttgtggaactgatgaggagaggggaccttccggtgtggctgagctacaaggtagcttctgccggtatctcttataaagaccgagaatggtgctttacaggggaaaggaataaccaaattttagaagaaaacatggaggttgaaatctggactagagagggagaaaagaaaaagctaaggccaaaatggttagatgcacgtgtgtacgctgaccccatggctttgaaggatttcaaggagtttgccagtggaagaaagagcataactcttgacatcctaacagagattgctactttgccaacttacctttcctctaaggccaagctagcccttgacaacatagtcatgctccacacaacagaaaaaggagggagggcctaccaacacgccctgaatgaactcccggagtcactggaaacactcatgcttgtagccctactaggtgctttgacagccggtatcttcctgtttttcatgcaggggaaaggaatagggaaattgtcaatgggtctgatagccatagctgtggccagtggcttgctctgggtagcagaaattcagccccagtggatagcagcttcaatcatactggagttttttcttatggtgctgttgataccagaaccagaaaaacaaaggaccccacaagacaatcaactgatctacgttatattgaccattctcaccattattggtctcatagcagccaatgagatggggctgattgaaaaaacaaaaacggactttgggttctaccaggtaaaaacagaaaccaccattctcgatgtggatttgagaccagcctcagcatggacactctacgcagtggctaccactattctgactcccatgctgagacacaccatagagaacacgtctgccaacctatctttggcagccattgccaaccaagcagctgtcctaatgggacttgggaaaggatggccgctccacagaatggacctcggcgtgccgctgctagcaatgggatgttattctcaagtgaacccaacaaccctgacagcatccctagtcatgcttttagtccattatgccataataggtccaggattacaggcaaaagccactagagaggcccagaaaaggacagctgctgggatcatgaaaaaccccacggtggacgggataacagtaatagatctagaaccaatatcctatgacccaaaatttgaaaagcaattagggcaagtcatgctactagtcctgtgtgttggacaattacttttaatgagaacaacatgggctctctgtgaagtattgactctggccacaggaccaatcatgaccttgtgggagggcaacccgggaagattttggaacacaaccatagcagtatccacagccaatatttttagaggaagctacttggcgggagctggactagctttttcgctcataaaaaatgcacaaacccctaggaggggaactgggaccacaggagagacactgggagagaagtggaagagacagctgaactcattagacagaaaagagtttgaagagtacaaaagaagtggaatactagaagtggacaggactgaagccaagtctgccctaagagatggatctaaaatcaagcacgcggtgtccagagggtctagtaagatcagatggattgttgaaagaggaatgataaaaccaaaaggaaaggtcgtagatcttggttgcgggaggggaggatggtcctattacatggcgacactcaagaacgtgactgaagtgaaaggatatactaaaggaggtccaggacatgaagaaccaatccccatggctacttatggctggaatttggtcaaactccattcaggggttgatgtgttctacaaacccactgagcaggtggacaccctgctatgtgacattggagagtcatcctctaatccgacaatagaggaaggaagaacattgagagtcttaaagatggtggagccatggctctcttcaaaacctgagttctgcatcaaagtcctcaacccctacatgccgacagttatagaagagctggagaaactgcagagaagacatggtggaagcctcgtcagatgcccgctatccaggaattctacccatgagatgtattgggtgtcaggtgcgtcgggaaacatcgtgagttctgtgaacacaatatcaaagatgctgttgaacaggttcacaacaaggcataggaaacccacttatgagaaggacgtagatcttggggcaggaacgagaagtgtctccactgaaacagaaaaaccagacatgacaatcattgggagaaggcttcagagattgcgagaagagcacaaagaaacctggcactatgaccaggaaaacccatacagaacctgggcgtatcatgggagctatgaagctccttcgacaggctcagcatcctccatggtgaacggggtagtaaaactgctgacaaaaccctgggatgtgattccaatggtgactcagttggccatgacagacacaaccccttttgggcaacaaagagtgttcaaggagaaggtggataccagaacaccacaaccaaaacccggcacacgaatgattatgaccatgacagccaattggttatgggccctcctcgggaagaagaaaagtcccagactgtgcacaagggaagagttcatctcaaaagttaggtcaaatgcagccataggcgcagtctttcaggaagaacagggatggacatcagccagtgaagctgtgaatgacagccggttctgggaactggttgacaaagaaagggctctgcaccaggaaggaaaatgtgaatcgtgtgtctataacatgatgggaaaacgtgagaaaaaattaggagagtttggtagggccaagggaagccgagcaatctggtacatgtggctgggggcgcggttcctggaatttgaagccctgggttttttgaacgaagatcactggtttagcagagaaaactcatggagtggagtggaaggggaaggtctgcatagattgggatacatcttggaggacatagacaagaaggatggagacctgatatatgctgacgacacagcaggctgggacacgagaatcactgaagatgaccttttaaatgaagaactgatcacagaacagatggcccctcaccacaagaccctagccaaagccattttcaaactaacctatcaaaacaaagtggtgaaagtcctcagacccacaccgaaaggagcggtaatggacatcatatccaggaaagaccaaagaggtagtggacaggttggaacatatggtttaaatacattcactaacatggaagtccaactcatccgccaaatggaagctgaaggagtcatcacacaagacgacatgcagaacccaagagggttgaaagaaagagttgagaaatggctgaaagagtgtggcgtcgacaggttgaagaggatggcaatcagtggagatgattgcgtggtgaagcccatagatgagaggtttagcacctccctcctcttcttgaatgacatgggaaaggtgaggaaagacatcccgcaatgggaaccatccaagggatggaaaaattggcaagaggttcctttctgctcccaccatttccacaagatcttcatgaaagatggccgctcactggttgttccatgcagaaaccaggatgaactgataggaagagccagaatctcgcagggggctggatggagcttgagagaaacagcctgtctgggcaaagcttatgcccagatgtggtcgcttatgtatttccatagaagggacctgcgcctagcctccatggccatatgctcagcggttccaacagaatggtttccaacaagcagaacaacatggtcaatccatgctcatcaccagtggatgaccactgaagatatgcttaaagtgtggaacagagtgtggatagaagataaccccaatatgactgacaagactccagtccattcgtgggaagacataccttacctagggaaaagagaggatctgtggtgtggatccctgattggactttcctctagagcaacctgggcgaagaacattcacacggccataacccaggtcaggaatctgatcggaaaagaggaatacgtggattacatgccagccatgaaaagatacagcgctcctttcgagagtgaaggagttctgtaa

SEQ ID NO: 29 - DNA, 10653 bp, synthetic construct
  source 1..10653: mol_type = other DNA
agttgttagtctgtgtggaccgacaaggacagttccaaatcggaagcttgcttaacacagttctaacagtttgttttaaatagagagcagatctctggaaaaatgaaccaacgaaaaaaggtggttagaccacctttcaatatgctgaaacgcgagagaaaccgcgtatcaacccctcaggggctggtcaagaggttctccaccggcctgttttctggcaagggccctctgaggatggtgctggccttcatcacatttctgcgcgtgctgagcatcccacctaccgcaggcatcctgaagcggtggggacagctgaagaagaacaaggccatcaagatcctgatcggcttcaggaaggagatcggccgcatgctgaacatcctgaatcggagaaggcgcagcacaatgaccctgctgtgcctgatcccaaccgtgatggccttccacctgtccacacgggacggcgagcctctgatgatcgtggccaagcacgagcggggcagaccactgctgtttaagaccacagagggcatcaataagtgtaccctgatcgctatggacctgggcgagatgtgcgaggacacagtgacctacaagtgtcccctgctggtgaacaccgagcctgaggacatcgattgctggtgtaatctgacatccacctgggtcatgtatggcacatgcacccagtctggcgagcggagaagggagaagcggtccgtggccctgaccccacactctggaatgggcctggagacacgggccgagacatggatgagctccgagggagcatggaagcacgcacagagggtggagagctggattctgaggaacccaggattcgcactgctggccggctttatggcctacatgatcggccagaccggcatccagaggacagtgttctttgtgctgatgatgctggtggcaccatcctatggcatgagatgcgtgggcgtgggcaatagagatttcgtggagggcgtgtctggaggagcatgggtggacctggtgctggagcacggaggatgcgtgaccacaatggcccagggcaagcctacactggattttgagctgaccaagaccacagccaaggaggtggccctgctgcggacctactgcatcgaggcctccatctctaacatcaccacagccaccagatgtcctacacagggcgagccataccttaaggaggagcaggaccagcagtatatctgccgccgggacgtggtggataggggatggggcaatggatgtggcctgttcggcaagggaggagtggtgacatgcgccaagttcctgtgctccggcaagatcaccggcaacctggtgcagatcgagaatctggagtataccgtggtggtgacagtgcacaacggcgatacccacgccgtgggcaacgacacatccaatcacggcgtgacagccaccatcacaccccggagcccttccgtggaggtgaagctgcccgattacggcgagctgaccctggactgcgagcctagatctggcatcgatttcaacgagatgatcctgatgaagatgaagaagaagacctggctggtgcacaagcagtggtttctggatctgcctctgccctggagcgccggagcagacacctccgaggtgcactggaattacaaggagaggatggtgacattcaaggtgccccacgcaaagaggcaggacgtgaccgtgctgggcagccaggagggagcaatgcactccgccctggccggagccaccgaggtggacagcggcgatggcaaccacatgttcgccggccacctgaagtgcaaggtgcggatggagaagctgagaatcaagggcatgtcctacacaatgtgcagcggcaagttttccatcgataaggagatggccgagacacagcacggcaccacagtggtgaaggtgaagtatgagggagcaggagcaccttgtaaggtgcctatcgagatccgggacgtgaacaaggagaaggtggtgggcagaatcatctctagcacccccttcgccgagaacaccaatagcgtgacaaatatcgagctggagccaccctttggcgatagctacatcgtgatcggagtgggcgactccgccctgacactgcactggttcagaaagggctcctctatcggcaagatgtttgagtccacctatcggggcgccaagaggatggctatcctgggcgagaccgcatgggacttcggcagcgtgggaggcctgtttaccagcctgggcaaggccgtgcaccaggtgttcggctccgtgtataccacaatgtttggcggcgtgtcttggatgatcagaatcctgatcggcttcctggtgctgtggatcggcaccaactctcgcaatacaagcatggccatgacctgcatcgccgtgggcggcatcacactgttcctgggctttaccgtgcaggccgatatgggctgcgtggtgagctggaacggcaaggagctgaagtgtggctccggcatcttcgtggtggacaatgtgcacacctggacagagcagtacaagtttcagccagagtctccagcaaggctggccagcgccatcctgaacgcccacaaggatggcgtgtgcggcatcaggagcaccacacgcctggagaatgtgatgtggaagcagatcacaaacgagctgaattatgtgctgtgggagggaggacacgatctgaccgtggtggcaggcgacgtgaagggcgtgctgaccaagggcaagagggccctgacacctccagtgaacgacctgaagtactcctggaagacatggggcaaggccaagatcttcacccccgaggcccgcaattctacatttctgatcgacggccccgataccagcgagtgccctaacggcagaagggcctggaatttcctggaggtggaggattatggcttcggcatgtttaccacaaacatctggatgaagtttagggagggcagctccgaggtgtgcgaccacaggctgatgtccgccgccatcaaggatcagaaggccgtgcacgccgacatgggctactggatcgagtctagcaagaatcagacatggcagatcgagaaggcctctctgatcgaggtgaagacctgcctgtggcctaagacccacacactgtggagcaacggcgtgctggagtctcagatgctgatcccacggagctacgccggacccttctcccagcacaattacagacagggatatgcaacccagacagcaggaccctggcacctgggcaagctggagatcgattttggcgagtgccctggcaccacagtgaccatccaggaggactgtgatcacaggggaccatccctgcgtacgacaaccgcctctggcaagctggtgacccagtggtgctgtaggagctgcacaatgccacctctgcgcttcctgggagaggacggctgttggtatggcatggagatccggcccctgtctgagaaggaggagaacatggtgaagagccaggtgaccgcaggacagggcacctccgagacattctctatgggcctgctgtgcctgacactgtttgtggaggagtgtctgcgccggagagtgaccagaaagtacatgatgctggtggtggtcatcaccttctgtgccatcatcctgggcggcctgacctggatggatctgctgagggccctgatcatgctgggcgacaccatgtccggaaggatcggaggacagatccacctggccatcatggccgtgttcaagatgtcccctggctacgtgctgggcgtgtttctgcggaagctgaccagccgggagacagccctgatggtcatcggcatggccatgacaaccgtgttctctatcccacacgacctgatggagctgatcgatggcatcagcctgggcctgatcctgctgaggatcgtgacccacttcgacaacacccaagtgggcaccctggccctgagcctgaccttcatccggagcacaacccctctggtcatggcctggagaaccatcatggccgtgttctttgtggtgaccctgatcccactgtgccgcacatcctgtctgcagaagcagtctcactgggtggagatcacagccctgatcctgggagcacaggccctgcccgtgtacctgatgaccctgatgaagggcgcctccaggcgctcttggccactgaacgagggcatcatggcagtgggcctggtgagcctgctgggctccgccctgctgaagaatgatgtgccactggccggacctatggtggcaggaggcctgctgctggccgcctacgtgatgagcggctcctctgccgacctgtccctggagaaggccgccaacgtgcagtgggacgagatggccgacatcaccggcagctcccccatcatcgaggtgaagcaggacgaggatggctctttcagcatcagggatgtggaggagacaaatatgatcacactgctggtgaagctggccctgatcaccgtgagcggcctgtaccctctggccatcccagtgacaatggccctgtggtatatctggcaggtgaagacccagcggagcggcgccctgtgggacgtgccatctcctgcagcaacccagaaggccacactgagcgagggcgtgtatcggatcatgcagagaggcctgttcggcaagacccaagtgggcgtgggcatccacatggagggcgtgtttcacacaatgtggcacgtgaccaggggctccgtgatctgccacgagacaggccgcctggagccatcctgggcagacgtgcggaacgatatgatctcttacggcggaggatggaggctgggcgacaagtgggataaggaggaggatgtgcaggtgctggccatcgagcccggcaagaatcctaagcacgtgcagaccaagcctggcctgttcaagaccctgacaggagagatcggagcagtgaccctggactttaagcctggtacctctggctctcccatcataaacaagaaagggaaagttatcggactctatggaaatggagtagttaccaaatcaggtgattacgttagtgccataacgcaagccgaaagaattggtgagccagattatgaagtggatgaggacatttttcgaaagaaaagattaactataatggacttacaccccggagccggaaagacaaaaagaattctcccatcaatagtcagagaagctttgaaaaggaggctgcgcaccttgattttggcccccacgagagtggtggcggccgagatggaagaggccttacgcggactgccaatccgttatcagaccccggctgtgaaatcagagcacacaggaagagagattgtagacctcatgtgtcatgcaaccttcacaacgagacttttgtcatcaaccagggttccaaattataacctcatagtgatggatgaagcacattttactgacccttgtagtgtcgcagctagaggatacatttcaaccagggtggaaatgggagaggcagcagctatcttcatgactgcaacccctcctggatcaatagatcccttcccccagagcaacagcccaatagaagacatcgagagggaaatcccagaaaggtcatggaacacagggttcgactggataacagactaccaaggaaaaactgtgtggtttgttcccagcataaaagctggaaatgacattgcaaattgtttgagaaagtcgggaaagagagtgatccagttgagcagaaaaacctttgacacagagtatccaaagacgaaactcacggattgggattttgtggttaccacagacatatctgaaatgggagctaatttcagagccgggagagtgatagaccccaggagatgcctcaagccagttatcctaacagatgggccagagagagttattctagcaggtccaattccagtaactccagcaagtgccgctcagagaagagggcgaataggtaggaatccagcacaagaagatgaccaatatgttttctccggagacccactaaagaatgatgaagatcatgcccactggacagaagcaaagatgttgcttgacaatatctacactcctgaagggataattccaacattgtttggtccggaaagggaaaaaacccaagccattgatggagagtttcgcctcagaggggaacaaaggaagacatttgtggaactgatgaggagaggggaccttccggtgtggctgagctacaaggtagcttctgccggtatctcttataaagaccgagaatggtgctttacaggggaaaggaataaccaaattttagaagaaaacatggaggttgaaatctggactagagagggagaaaagaaaaagctaaggccaaaatggttagatgcacgtgtgtacgctgaccccatggctttgaaggatttcaaggagtttgccagtggaagaaagagcataactcttgacatcctaacagagattgctactttgccaacttacctttcctctaaggccaagctagcccttgacaacatagtcatgctccacacaacagaaaaaggagggagggcctaccaacacgccctgaatgaactcccggagtcactggaaacactcatgcttgtagccctactaggtgctttgacagccggtatcttcctgtttttcatgcaggggaaaggaatagggaaattgtcaatgggtctgatagccatagctgtggccagtggcttgctctgggtagcagaaattcagccccagtggatagcagcttcaatcatactggagttttttcttatggtgctgttgataccagaaccagaaaaacaaaggaccccacaagacaatcaactgatctacgttatattgaccattctcaccattattggtctcatagcagccaatgagatggggctgattgaaaaaacaaaaacggactttgggttctaccaggtaaaaacagaaaccaccattctcgatgtggatttgagaccagcctcagcatggacactctacgcagtggctaccactattctgactcccatgctgagacacaccatagagaacacgtctgccaacctatctttggcagccattgccaaccaagcagctgtcctaatgggacttgggaaaggatggccgctccacagaatggacctcggcgtgccgctgctagcaatgggatgttattctcaagtgaacccaacaaccctgacagcatccctagtcatgcttttagtccattatgccataataggtccaggattacaggcaaaagccactagagaggcccagaaaaggacagctgctgggatcatgaaaaaccccacggtggacgggataacagtaatagatctagaaccaatatcctatgacccaaaatttgaaaagcaattagggcaagtcatgctactagtcctgtgtgttggacaattacttttaatgagaacaacatgggctctctgtgaagtattgactctggccacaggaccaatcatgaccttgtgggagggcaacccgggaagattttggaacacaaccatagcagtatccacagccaatatttttagaggaagctacttggcgggagctggactagctttttcgctcataaaaaatgcacaaacccctaggaggggaactgggaccacaggagagacactgggagagaagtggaagagacagctgaactcattagacagaaaagagtttgaagagtacaaaagaagtggaatactagaagtggacaggactgaagccaagtctgccctaagagatggatctaaaatcaagcacgcggtgtccagagggtctagtaagatcagatggattgttgaaagaggaatgataaaaccaaaaggaaaggtcgtagatcttggttgcgggaggggaggatggtcctattacatggcgacactcaagaacgtgactgaagtgaaaggatatactaaaggaggtccaggacatgaagaaccaatccccatggctacttatggctggaatttggtcaaactccattcaggggttgatgtgttctacaaacccactgagcaggtggacaccctgctatgtgacattggagagtcatcctctaatccgacaatagaggaaggaagaacattgagagtcttaaagatggtggagccatggctctcttcaaaacctgagttctgcatcaaagtcctcaacccctacatgccgacagttatagaagagctggagaaactgcagagaagacatggtggaagcctcgtcagatgcccgctatccaggaattctacccatgagatgtattgggtgtcaggtgcgtcgggaaacatcgtgagttctgtgaacacaatatcaaagatgctgttgaacaggttcacaacaaggcataggaaacccacttatgagaaggacgtagatcttggggcaggaacgagaagtgtctccactgaaacagaaaaaccagacatgacaatcattgggagaaggcttcagagattgcgagaagagcacaaagaaacctggcactatgaccaggaaaacccatacagaacctgggcgtatcatgggagctatgaagctccttcgacaggctcagcatcctccatggtgaacggggtagtaaaactgctgacaaaaccctgggatgtgattccaatggtgactcagttggccatgacagacacaaccccttttgggcaacaaagagtgttcaaggagaaggtggataccagaacaccacaaccaaaacccggcacacgaatgattatgaccatgacagccaattggttatgggccctcctcgggaagaagaaaagtcccagactgtgcacaagggaagagttcatctcaaaagttaggtcaaatgcagccataggcgcagtctttcaggaagaacagggatggacatcagccagtgaagctgtgaatgacagccggttctgggaactggttgacaaagaaagggctctgcaccaggaaggaaaatgtgaatcgtgtgtctataacatgatgggaaaacgtgagaaaaaattaggagagtttggtagggccaagggaagccgagcaatctggtacatgtggctgggggcgcggttcctggaatttgaagccctgggttttttgaacgaagatcactggtttagcagagaaaactcatggagtggagtggaaggggaaggtctgcatagattgggatacatcttggaggacatagacaagaaggatggagacctgatatatgctgacgacacagcaggctgggacacgagaatcactgaagatgaccttttaaatgaagaactgatcacagaacagatggcccctcaccacaagaccctagccaaagccattttcaaactaacctatcaaaacaaagtggtgaaagtcctcagacccacaccgaaaggagcggtaatggacatcatatccaggaaagaccaaagaggtagtggacaggttggaacatatggtttaaatacattcactaacatggaagtccaactcatccgccaaatggaagctgaaggagtcatcacacaagacgacatgcagaacccaagagggttgaaagaaagagttgagaaatggctgaaagagtgtggcgtcgacaggttgaagaggatggcaatcagtggagatgattgcgtggtgaagcccatagatgagaggtttagcacctccctcctcttcttgaatgacatgggaaaggtgaggaaagacatcccgcaatgggaaccatccaagggatggaaaaattggcaagaggttcctttctgctcccaccatttccacaagatcttcatgaaagatggccgctcactggttgttccatgcagaaaccaggatgaactgataggaagagccagaatctcgcagggggctggatggagcttgagagaaacagcctgtctgggcaaagcttatgcccagatgtggtcgcttatgtatttccatagaagggacctgcgcctagcctccatggccatatgctcagcggttccaacagaatggtttccaacaagcagaacaacatggtcaatccatgctcatcaccagtggatgaccactgaagatatgcttaaagtgtggaacagagtgtggatagaagataaccccaatatgactgacaagactccagtccattcgtgggaagacataccttacctagggaaaagagaggatctgtggtgtggatccctgattggactttcctctagagcaacctgggcgaagaacattcacacggccataacccaggtcaggaatctgatcggaaaagaggaatacgtggattacatgccagccatgaaaagatacagcgctcctttcgagagtgaaggagttctgtaattattgacaacaaacaccaaagagaccattgaagtcaggccacttgtgccacggcttgagcaaaccgtgctgcctgtagctccgccaataatgggaggcgtaaaattcccagggaggccatgcgccacggaagctgtacgcgtggcatattggactagcggttagaggagacccctcccatcactgacaaaacgcagcaaaaaagggggcccgaagccaggaggaagctgtacttctggtggaaggactagaggttagaggagacccccccaacacaaaaacagcatattgacgctgggaaagaccagagatcctgctgtctctgcaacatcaatccaggcacagagcgccacgagatggattggtgttgttgaatcaacaggttct

SEQ ID NO: 30 - DNA, 10164 bp, synthetic construct
  source 1..10164: mol_type = other DNA
atgaaccaacgaaaaaaggtggttagaccacctttcaatatgctgaaacgcgagagaaaccgcgtatcaacccctcaggggctggtcaagaggttctccaccggcctgttttctggcaagggccctctgaggatggtgctggccttcatcacatttctgcgcgtgctgagcatcccacctaccgcaggcatcctgaagcggtggggacagctgaagaagaacaaggccatcaagatcctgatcggcttcaggaaggagatcggccgcatgctgaacatcctgaatcggagaaggcgcagcacaatgaccctgctgtgcctgatcccaaccgtgatggccttccacctgtccacacgggacggcgagcctctgatgatcgtggccaagcacgagcggggcagaccactgctgtttaagaccacagagggcatcaataagtgtaccctgatcgctatggacctgggcgagatgtgcgaggacacagtgacctacaagtgtcccctgctggtgaacaccgagcctgaggacatcgattgctggtgtaatctgacatccacctgggtcatgtatggcacatgcacccagtctggcgagcggagaagggagaagcggtccgtggccctgaccccacactctggaatgggcctggagacacgggccgagacatggatgagctccgagggagcatggaagcacgcacagagggtggagagctggattctgaggaacccaggattcgcactgctggccggctttatggcctacatgatcggccagaccggcatccagaggacagtgttctttgtgctgatgatgctggtggcaccatcctatggcatgagatgcgtgggcgtgggcaatagagatttcgtggagggcgtgtctggaggagcatgggtggacctggtgctggagcacggaggatgcgtgaccacaatggcccagggcaagcctacactggattttgagctgaccaagaccacagccaaggaggtggccctgctgcggacctactgcatcgaggcctccatctctaacatcaccacagccaccagatgtcctacacagggcgagccataccttaaggaggagcaggaccagcagtatatctgccgccgggacgtggtggataggggatggggcaatggatgtggcctgttcggcaagggaggagtggtgacatgcgccaagttcctgtgctccggcaagatcaccggcaacctggtgcagatcgagaatctggagtataccgtggtggtgacagtgcacaacggcgatacccacgccgtgggcaacgacacatccaatcacggcgtgacagccaccatcacaccccggagcccttccgtggaggtgaagctgcccgattacggcgagctgaccctggactgcgagcctagatctggcatcgatttcaacgagatgatcctgatgaagatgaagaagaagacctggctggtgcacaagcagtggtttctggatctgcctctgccctggagcgccggagcagacacctccgaggtgcactggaattacaaggagaggatggtgacattcaaggtgccccacgcaaagaggcaggacgtgaccgtgctgggcagccaggagggagcaatgcactccgccctggccggagccaccgaggtggacagcggcgatggcaaccacatgttcgccggccacctgaagtgcaaggtgcggatggagaagctgagaatcaagggcatgtcctacacaatgtgcagcggcaagttttccatcgataaggagatggccgagacacagcacggcaccacagtggtgaaggtgaagtatgagggagcaggagcaccttgtaaggtgcctatcgagatccgggacgtgaacaaggagaaggtggtgggcagaatcatctctagcacccccttcgccgagaacaccaatagcgtgacaaatatcgagctggagccaccctttggcgatagctacatcgtgatcggagtgggcgactccgccctgacactgcactggttcagaaagggctcctctatcggcaagatgtttgagtccacctatcggggcgccaagaggatggctatcctgggcgagaccgcatgggacttcggcagcgtgggaggcctgtttaccagcctgggcaaggccgtgcaccaggtgttcggctccgtgtataccacaatgtttggcggcgtgtcttggatgatcagaatcctgatcggcttcctggtgctgtggatcggcaccaactctcgcaatacaagcatggccatgacctgcatcgccgtgggcggcatcacactgttcctgggctttaccgtgcaggccgatatgggctgcgtggtgagctggaacggcaaggagctgaagtgtggctccggcatcttcgtggtggacaatgtgcacacctggacagagcagtacaagtttcagccagagtctccagcaaggctggccagcgccatcctgaacgcccacaaggatggcgtgtgcggcatcaggagcaccacacgcctggagaatgtgatgtggaagcagatcacaaacgagctgaattatgtgctgtgggagggaggacacgatctgaccgtggtggcaggcgacgtgaagggcgtgctgaccaagggcaagagggccctgacacctccagtgaacgacctgaagtactcctggaagacatggggcaaggccaagatcttcacccccgaggcccgcaattctacatttctgatcgacggccccgataccagcgagtgccctaacggcagaagggcctggaatttcctggaggtggaggattatggcttcggcatgtttaccacaaacatctggatgaagtttagggagggcagctccgaggtgtgcgaccacaggctgatgtccgccgccatcaaggatcagaaggccgtgcacgccgacatgggctactggatcgagtctagcaagaatcagacatggcagatcgagaaggcctctctgatcgaggtgaagacctgcctgtggcctaagacccacacactgtggagcaacggcgtgctggagtctcagatgctgatcccacggagctacgccggacccttctcccagcacaattacagacagggatatgcaacccagacagcaggaccctggcacctgggcaagctggagatcgattttggcgagtgccctggcaccacagtgaccatccaggaggactgtgatcacaggggaccatccctgcgtacgacaaccgcctctggcaagctggtgacccagtggtgctgtaggagctgcacaatgccacctctgcgcttcctgggagaggacggctgttggtatggcatggagatccggcccctgtctgagaaggaggagaacatggtgaagagccaggtgaccgcaggacagggcacctccgagacattctctatgggcctgctgtgcctgacactgtttgtggaggagtgtctgcgccggagagtgaccagaaagtacatgatgctggtggtggtcatcaccttctgtgccatcatcctgggcggcctgacctggatggatctgctgagggccctgatcatgctgggcgacaccatgtccggaaggatcggaggacagatccacctggccatcatggccgtgttcaagatgtcccctggctacgtgctgggcgtgtttctgcggaagctgaccagccgggagacagccctgatggtcatcggcatggccatgacaaccgtgttctctatcccacacgacctgatggagctgatcgatggcatcagcctgggcctgatcctgctgaggatcgtgacccacttcgacaacacccaagtgggcaccctggccctgagcctgaccttcatccggagcacaacccctctggtcatggcctggagaaccatcatggccgtgttctttgtggtgaccctgatcccactgtgccgcacatcctgtctgcagaagcagtctcactgggtggagatcacagccctgatcctgggagcacaggccctgcccgtgtacctgatgaccctgatgaagggcgcctccaggcgctcttggccactgaacgagggcatcatggcagtgggcctggtgagcctgctgggctccgccctgctgaagaatgatgtgccactggccggacctatggtggcaggaggcctgctgctggccgcctacgtgatgagcggctcctctgccgacctgtccctggagaaggccgccaacgtgcagtgggacgagatggccgacatcaccggcagctcccccatcatcgaggtgaagcaggacgaggatggctctttcagcatcagggatgtggaggagacaaatatgatcacactgctggtgaagctggccctgatcaccgtgagcggcctgtaccctctggccatcccagtgacaatggccctgtggtatatctggcaggtgaagacccagcggagcggcgccctgtgggacgtgccatctcctgcagcaacccagaaggccacactgagcgagggcgtgtatcggatcatgcagagaggcctgttcggcaagacccaagtgggcgtgggcatccacatggagggcgtgtttcacacaatgtggcacgtgaccaggggctccgtgatctgccacgagacaggccgcctggagccatcctgggcagacgtgcggaacgatatgatctcttacggcggaggatggaggctgggcgacaagtgggataaggaggaggatgtgcaggtgctggccatcgagcccggcaagaatcctaagcacgtgcagaccaagcctggcctgttcaagaccctgacaggagagatcggagcagtgaccctggactttaagcctggtacctctggctctcccatcataaacaagaaagggaaagttatcggactctatggaaatggagtagttaccaaatcaggtgattacgttagtgccataacgcaagccgaaagaattggtgagccagattatgaagtggatgaggacatttttcgaaagaaaagattaactataatggacttacaccccggagccggaaagacaaaaagaattctcccatcaatagtcagagaagctttgaaaaggaggctgcgcaccttgattttggcccccacgagagtggtggcggccgagatggaagaggccttacgcggactgccaatccgttatcagaccccggctgtgaaatcagagcacacaggaagagagattgtagacctcatgtgtcatgcaaccttcacaacgagacttttgtcatcaaccagggttccaaattataacctcatagtgatggatgaagcacattttactgacccttgtagtgtcgcagctagaggatacatttcaaccagggtggaaatgggagaggcagcagctatcttcatgactgcaacccctcctggatcaatagatcccttcccccagagcaacagcccaatagaagacatcgagagggaaatcccagaaaggtcatggaacacagggttcgactggataacagactaccaaggaaaaactgtgtggtttgttcccagcataaaagctggaaatgacattgcaaattgtttgagaaagtcgggaaagagagtgatccagttgagcagaaaaacctttgacacagagtatccaaagacgaaactcacggattgggattttgtggttaccacagacatatctgaaatgggagctaatttcagagccgggagagtgatagaccccaggagatgcctcaagccagttatcctaacagatgggccagagagagttattctagcaggtccaattccagtaactccagcaagtgccgctcagagaagagggcgaataggtaggaatccagcacaagaagatgaccaatatgttttctccggagacccactaaagaatgatgaagatcatgcccactggacagaagcaaagatgttgcttgacaatatctacactcctgaagggataattccaacattgtttggtccggaaagggaaaaaacccaagccattgatggagagtttcgcctcagaggggaacaaaggaagacatttgtggaactgatgaggagaggggaccttccggtgtggctgagctacaaggtagcttctgccggtatctcttataaagaccgagaatggtgctttacaggggaaaggaataaccaaattttagaagaaaacatggaggttgaaatctggactagagagggagaaaagaaaaagctaaggccaaaatggttagatgcacgtgtgtacgctgaccccatggctttgaaggatttcaaggagtttgccagtggaagaaagagcataactcttgacatcctaacagagattgctactttgccaacttacctttcctctaaggccaagctagcccttgacaacatagtcatgctccacacaacagaaaaaggagggagggcctaccaacacgccctgaatgaactcccggagtcactggaaacactcatgcttgtagccctactaggtgctttgacagccggtatcttcctgtttttcatgcaggggaaaggaatagggaaattgtcaatgggtctgatagccatagctgtggccagtggcttgctctgggtagcagaaattcagccccagtggatagcagcttcaatcatactggagttttttcttatggtgctgttgataccagaaccagaaaaacaaaggaccccacaagacaatcaactgatctacgttatattgaccattctcaccattattggtctcatagcagccaatgagatggggctgattgaaaaaacaaaaacggactttgggttctaccaggtaaaaacagaaaccaccattctcgatgtggatttgagaccagcctcagcatggacactctacgcagtggctaccactattctgactcccatgctgagacacaccatagagaacacgtctgccaacctatctttggcagccattgccaaccaagcagctgtcctaatgggacttgggaaaggatggccgctccacagaatggacctcggcgtgccgctgctagcaatgggatgttattctcaagtgaacccaacaaccctgacagcatccctagtcatgcttttagtccattatgccataataggtccaggattacaggcaaaagccactagagaggcccagaaaaggacagctgctgggatcatgaaaaaccccacggtggacgggataacagtaatagatctagaaccaatatcctatgacccaaaatttgaaaagcaattagggcaagtcatgctactagtcctgtgtgttggacaattacttttaatgagaacaacatgggctctctgtgaagtattgactctggccacaggaccaatcatgaccttgtgggagggcaacccgggaagattttggaacacaaccatagcagtatccacagccaatatttttagaggaagctacttggcgggagctggactagctttttcgctcataaaaaatgcacaaacccctaggaggggaactgggaccacaggagagacactgggagagaagtggaagagacagctgaactcattagacagaaaagagtttgaagagtacaaaagaagtggaatactagaagtggacaggactgaagccaagtctgccctaagagatggatctaaaatcaagcacgcggtgtccagagggtctagtaagatcagatggattgttgaaagaggaatgataaaaccaaaaggaaaggtcgtagatcttggttgcgggaggggaggatggtcctattacatggcgacactcaagaacgtgactgaagtgaaaggatatactaaaggaggtccaggacatgaagaaccaatccccatggctacttatggctggaatttggtcaaactccattcaggggttgatgtgttctacaaacccactgagcaggtggacaccctgctatgtgacattggagagtcatcctctaatccgacaatagaggaaggaagaacattgagagtcttaaagatggtggagccatggctctcttcaaaacctgagttctgcatcaaagtcctcaacccctacatgccgacagttatagaagagctggagaaactgcagagaagacatggtggaagcctcgtcagatgcccgctatccaggaattctacccatgagatgtattgggtgtcaggtgcgtcgggaaacatcgtgagttctgtgaacacaatatcaaagatgctgttgaacaggttcacaacaaggcataggaaacccacttatgagaaggacgtagatcttggggcaggaacgagaagtgtctccactgaaacagaaaaaccagacatgacaatcattgggagaaggcttcagagattgcgagaagagcacaaagaaacctggcactatgaccaggaaaacccatacagaacctgggcgtatcatgggagctatgaagctccttcgacaggctcagcatcctccatggtgaacggggtagtaaaactgctgacaaaaccctgggatgtgattccaatggtgactcagttggccatgacagacacaaccccttttgggcaacaaagagtgttcaaggagaaggtggataccagaacaccacaaccaaaacccggcacacgaatgattatgaccatgacagccaattggttatgggccctcctcgggaagaagaaaagtcccagactgtgcacaagggaagagttcatctcaaaagttaggtcaaatgcagccataggcgcagtctttcaggaagaacagggatggacatcagccagtgaagctgtgaatgacagccggttctgggaactggttgacaaagaaagggctctgcaccaggaaggaaaatgtgaatcgtgtgtctataacatgatgggaaaacgtgagaaaaaattaggagagtttggtagggccaagggaagccgagcaatctggtacatgtggctgggggcgcggttcctggaatttgaagccctgggttttttgaacgaagatcactggtttagcagagaaaactcatggagtggagtggaaggggaaggtctgcatagattgggatacatcttggaggacatagacaagaaggatggagacctgatatatgctgacgacacagcaggctgggacacgagaatcactgaagatgaccttttaaatgaagaactgatcacagaacagatggcccctcaccacaagaccctagccaaagccattttcaaactaacctatcaaaacaaagtggtgaaagtcctcagacccacaccgaaaggagcggtaatggacatcatatccaggaaagaccaaagaggtagtggacaggttggaacatatggtttaaatacattcactaacatggaagtccaactcatccgccaaatggaagctgaaggagtcatcacacaagacgacatgcagaacccaagagggttgaaagaaagagttgagaaatggctgaaagagtgtggcgtcgacaggttgaagaggatggcaatcagtggagatgattgcgtggtgaagcccatagatgagaggtttagcacctccctcctcttcttgaatgacatgggaaaggtgaggaaagacatcccgcaatgggaaccatccaagggatggaaaaattggcaagaggttcctttctgctcccaccatttccacaagatcttcatgaaagatggccgctcactggttgttccatgcagaaaccaggatgaactgataggaagagccagaatctcgcagggggctggatggagcttgagagaaacagcctgtctgggcaaagcttatgcccagatgtggtcgcttatgtatttccatagaagggacctgcgcctagcctccatggccatatgctcagcggttccaacagaatggtttccaacaagcagaacaacatggtcaatccatgctcatcaccagtggatgaccactgaagatatgcttaaagtgtggaacagagtgtggatagaagataaccccaatatgactgacaagactccagtccattcgtgggaagacataccttacctagggaaaagagaggatctgtggtgtggatccctgattggactttcctctagagcaacctgggcgaagaacattcacacggccataacccaggtcaggaatctgatcggaaaagaggaatacgtggattacatgccagccatgaaaagatacagcgctcctttcgagagtgaaggagttctgtaa

SEQ ID NO: 31 - DNA, 10653 bp, synthetic construct
  source 1..10653: mol_type = other DNA
agttgttagtctgtgtggaccgacaaggacagttccaaatcggaagcttgcttaacacagttctaacagtttgttttaaatagagagcagatctctggaaaaatgaaccaacgaaaaaaggtggttagaccacctttcaatatgctgaaacgcgagagaaaccgcgtatcaacccctcaggggctggtcaagaggttctccaccggcctgttttctggcaagggccctctgaggatggtgctggccttcatcacatttctgcgcgtgctgagcatcccacctaccgcaggcatcctgaagcggtggggacagctgaagaagaacaaggccatcaagatcctgatcggcttcaggaaggagatcggccgcatgctgaacatcctgaatcggagaaggcgcagcacaatgaccctgctgtgcctgatcccaaccgtgatggccttccacctgtccacacgggacggcgagcctctgatgatcgtggccaagcacgagcggggcagaccactgctgtttaagaccacagagggcatcaataagtgtaccctgatcgctatggacctgggcgagatgtgcgaggacacagtgacctacaagtgtcccctgctggtgaacaccgagcctgaggacatcgattgctggtgtaatctgacatccacctgggtcatgtatggcacatgcacccagtctggcgagcggagaagggagaagcggtccgtggccctgaccccacactctggaatgggcctggagacacgggccgagacatggatgagctccgagggagcatggaagcacgcacagagggtggagagctggattctgaggaacccaggattcgcactgctggccggctttatggcctacatgatcggccagaccggcatccagaggacagtgttctttgtgctgatgatgctggtggcaccatcctatggcatgagatgcgtgggcgtgggcaatagagatttcgtggagggcgtgtctggaggagcatgggtggacctggtgctggagcacggaggatgcgtgaccacaatggcccagggcaagcctacactggattttgagctgaccaagaccacagccaaggaggtggccctgctgcggacctactgcatcgaggcctccatctctaacatcaccacagccaccagatgtcctacacagggcgagccataccttaaggaggagcaggaccagcagtatatctgccgccgggacgtggtggataggggatggggcaatggatgtggcctgttcggcaagggaggagtggtgacatgcgccaagttcctgtgctccggcaagatcaccggcaacctggtgcagatcgagaatctggagtataccgtggtggtgacagtgcacaacggcgatacccacgccgtgggcaacgacacatccaatcacggcgtgacagccaccatcacaccccggagcccttccgtggaggtgaagctgcccgattacggcgagctgaccctggactgcgagcctagatctggcatcgatttcaacgagatgatcctgatgaagatgaagaagaagacctggctggtgcacaagcagtggtttctggatctgcctctgccctggagcgccggagcagacacctccgaggtgcactggaattacaaggagaggatggtgacattcaaggtgccccacgcaaagaggcaggacgtgaccgtgctgggcagccaggagggagcaatgcactccgccctggccggagccaccgaggtggacagcggcgatggcaaccacatgttcgccggccacctgaagtgcaaggtgcggatggagaagctgagaatcaagggcatgtcctacacaatgtgcagcggcaagttttccatcgataaggagatggccgagacacagcacggcaccacagtggtgaaggtgaagtatgagggagcaggagcaccttgtaaggtgcctatcgagatccgggacgtgaacaaggagaaggtggtgggcagaatcatctctagcacccccttcgccgagaacaccaatagcgtgacaaatatcgagctggagccaccctttggcgatagctacatcgtgatcggagtgggcgactccgccctgacactgcactggttcagaaagggctcctctatcggcaagatgtttgagtccacctatcggggcgccaagaggatggctatcctgggcgagaccgcatgggacttcggcagcgtgggaggcctgtttaccagcctgggcaaggccgtgcaccaggtgttcggctccgtgtataccacaatgtttggcggcgtgtcttggatgatcagaatcctgatcggcttcctggtgctgtggatcggcaccaactctcgcaatacaagcatggccatgacctgcatcgccgtgggcggcatcacactgttcctgggctttaccgtgcaggccgatatgggctgcgtggtgagctggaacggcaaggagctgaagtgtggctccggcatcttcgtggtggacaatgtgcacacctggacagagcagtacaagtttcagccagagtctccagcaaggctggccagcgccatcctgaacgcccacaaggatggcgtgtgcggcatcaggagcaccacacgcctggagaatgtgatgtggaagcagatcacaaacgagctgaattatgtgctgtgggagggaggacacgatctgaccgtggtggcaggcgacgtgaagggcgtgctgaccaagggcaagagggccctgacacctccagtgaacgacctgaagtactcctggaagacatggggcaaggccaagatcttcacccccgaggcccgcaattctacatttctgatcgacggccccgataccagcgagtgccctaacggcagaagggcctggaatttcctggaggtggaggattatggcttcggcatgtttaccacaaacatctggatgaagtttagggagggcagctccgaggtgtgcgaccacaggctgatgtccgccgccatcaaggatcagaaggccgtgcacgccgacatgggctactggatcgagtctagcaagaatcagacatggcagatcgagaaggcctctctgatcgaggtgaagacctgcctgtggcctaagacccacacactgtggagcaacggcgtgctggagtctcagatgctgatcccacggagctacgccggacccttctcccagcacaattacagacagggatatgcaacccagacagcaggaccctggcacctgggcaagctggagatcgattttggcgagtgccctggcaccacagtgaccatccaggaggactgtgatcacaggggaccatccctgcgtacgacaaccgcctctggcaagctggtgacccagtggtgctgtaggagctgcacaatgccacctctgcgcttcctgggagaggacggctgttggtatggcatggagatccggcccctgtctgagaaggaggagaacatggtgaagagccaggtgaccgcaggacagggcacctccgagacattctctatgggcctgctgtgcctgacactgtttgtggaggagtgtctgcgccggagagtgaccagaaagtacatgatgctggtggtggtcatcaccttctgtgccatcatcctgggcggcctgacctggatggatctgctgagggccctgatcatgctgggcgacaccatgtccggaaggatcggaggacagatccacctggccatcatggccgtgttcaagatgtcccctggctacgtgctgggcgtgtttctgcggaagctgaccagccgggagacagccctgatggtcatcggcatggccatgacaaccgtgttctctatcccacacgacctgatggagctgatcgatggcatcagcctgggcctgatcctgctgaggatcgtgacccacttcgacaacacccaagtgggcaccctggccctgagcctgaccttcatccggagcacaacccctctggtcatggcctggagaaccatcatggccgtgttctttgtggtgaccctgatcccactgtgccgcacatcctgtctgcagaagcagtctcactgggtggagatcacagccctgatcctgggagcacaggccctgcccgtgtacctgatgaccctgatgaagggcgcctccaggcgctcttggccactgaacgagggcatcatggcagtgggcctggtgagcctgctgggctccgccctgctgaagaatgatgtgccactggccggacctatggtggcaggaggcctgctgctggccgcctacgtgatgagcggctcctctgccgacctgtccctggagaaggccgccaacgtgcagtgggacgagatggccgacatcaccggcagctcccccatcatcgaggtgaagcaggacgaggatggctctttcagcatcagggatgtggaggagacaaatatgatcacactgctggtgaagctggccctgatcaccgtgagcggcctgtaccctctggccatcccagtgacaatggccctgtggtatatctggcaggtgaagacccagcggagcggcgccctgtgggacgtgccatctcctgcagcaacccagaaggccacactgagcgagggcgtgtatcggatcatgcagagaggcctgttcggcaagacccaagtgggcgtgggcatccacatggagggcgtgtttcacacaatgtggcacgtgaccaggggctccgtgatctgccacgagacaggccgcctggagccatcctgggcagacgtgcggaacgatatgatctcttacggcggaggatggaggctgggcgacaagtgggataaggaggaggatgtgcaggtgctggccatcgagcccggcaagaatcctaagcacgtgcagaccaagcctggcctgttcaagaccctgacaggagagatcggagcagtgaccctggactttaagcctggtacctccggctctccaatcatcaacaagaagggcaaagtgatcggcctgtacggcaatggcgtggtgacaaagagcggcgattacgtgagcgccatcacccaggcagagaggatcggagagccagactatgaggtggacgaggacatcttccggaagaagcggctgacaatcatggatctgcaccctggcgccggcaagaccaagagaatcctgccaagcatcgtgcgcgaggccctgaagcggagactgcggacactgatcctggcaccaaccagagtggtggcagcagagatggaggaggccctgaggggcctgccaatccgctaccagacccctgccgtgaagtccgagcacacaggcagagagatcgtggacctgatgtgccacgccaccttcacaaccaggctgctgtctagcacacgcgtgccaaactacaatctgatcgtgatggacgaggcccactttacagatccctgtagcgtggccgccagaggctatatctccaccagagtggagatgggagaggcagcagcaatcttcatgaccgccacaccacccggcagcatcgatccatttccccagagcaactcccctatcgaggacatcgagcgggagatcccagagagatcttggaatacaggcttcgactggatcaccgattatcagggcaagacagtgtggtttgtgcccagcatcaaggccggcaacgacatcgccaattgcctgaggaagtctggcaagcgcgtgatccagctgagccggaagaccttcgatacagagtaccctaagaccaagctgacagactgggatttcgtggtgacaaccgacatctccgagatgggcgccaactttcgggccggcagagtgatcgatccaaggcgctgtctgaagcccgtgatcctgacagacggaccagagagagtgatcctggcaggacctatcccagtgacccctgcctccgccgcacagcggagaggcaggatcggccgcaatccagcccaggaggacgatcagtacgtgttctctggcgatcccctgaagaacgacgaggatcacgcccactggaccgaggccaagatgctgctggacaatatctatacccccgagggcatcatccctacactgtttggcccagagagggagaagacacaggcaatcgacggagagttcaggctgaggggagagcagcgcaagacctttgtggagctgatgaggaggggcgatctgcccgtgtggctgagctacaaggtggcctctgccggcatcagctataaggacagggagtggtgcttcacaggcgagcgcaacaatcagatcctggaggagaacatggaggtggagatctggacccgggagggcgagaagaagaagctgcggcccaagtggctggacgccagagtgtacgccgaccctatggccctgaaggacttcaaggagtttgcctccggcagaaagtctatcaccctggacatcctgaccgagatcgccaccctgcctacatacctgtcctctaaggccaagctggccctggacaacatcgtgatgctgcacacaaccgagaagggcggcagggcctatcagcacgccctgaatgagctgccagagagcctggagacactgatgctggtggccctgctgggcgccctgaccgcaggcatctttctgttctttatgcagggcaagggcatcggcaagctgagcatgggcctgatcgccatcgcagtggcctccggcctgctgtgggtggcagagatccagccacagtggatcgcagcctccatcatcctggagttctttctgatggtgctgctgatccccgagcctgagaagcagcgcacccctcaggataaccagctgatctacgtgatcctgaccatcctgacaatcatcggcctgatcgccgccaatgagatgggcctgatcgagaagaccaagacagacttcggcttttaccaggtgaagaccgagacaaccatcctggacgtggatctgaggcccgccagcgcctggacactgtatgcagtggccacaaccatcctgacccctatgctgcgccacaccatcgagaacacaagcgccaatctgtccctggccgcaatcgcaaaccaggcagccgtgctgatgggcctgggcaagggatggccactgcacaggatggacctgggcgtgcctctgctggctatgggctgctactctcaagtgaatcccacaaccctgaccgccagcctggtcatgctgctggtgcactatgccatcatcggacctggcctgcaggcaaaggcaaccagggaggcacagaagagaacagcagcaggcatcatgaagaacccaacagtggatggcatcaccgtgatcgacctggagcccatcagctacgaccctaagttcgagaagcagctgggccaggtcatgctgctggtgctgtgcgtgggccagctgctgctgatgagaacaacctgggcactgtgcgaggtgctgaccctggccacaggaccaatcatgacactgtgggagggcaaccccggccggttttggaatacaaccatcgccgtgtccaccgccaacatcttcagaggctcttatctggcaggagcaggcctggccttttccctgatcaagaatgcccagacacctaggagaggcaccggcacaaccggagagacactgggagagaagtggaagaggcagctgaacagcctggaccgcaaggagttcgaggagtacaagcggtccggcatcctggaggtggatagaaccgaggcaaagagcgccctgagggacggctccaagatcaagcacgccgtgagccggggcagctccaagatcaggtggatcgtggagcgcggcatgatcaagcccaagggcaaggtggtggatctgggatgcggaagaggaggatggtcctactatatggccacactgaagaacgtgaccgaggtgaagggctacacaaagggaggacctggacacgaggagccaatccctatggccacctacggctggaatctggtgaagctgcacagcggcgtggacgtgttctataagccaacagagcaggtggacaccctgctgtgcgacatcggcgagtctagctccaaccccaccatcgaggagggccggacactgagagtgctgaagatggtggagccttggctgtctagcaagccagagttttgcatcaaggtgctgaatccttacatgccaaccgtgatcgaggagctggagaagctgcagaggcgccacggcggctctctggtgcggtgtccactgagcagaaactccacacacgagatgtattgggtgtctggcgccagcggcaacatcgtgtcctctgtgaataccatcagcaagatgctgctgaataggttcacaacccggcacagaaagcctacatacgagaaggacgtggatctgggagcaggcacccgctctgtgagcaccgagacagagaagccagatatgaccatcatcggccggagactgcagaggctgagggaggagcacaaggagacatggcactacgaccaggagaacccttataggacctgggcctaccacggcagctatgaggcaccatccacaggcagcgccagcagcatggtgaatggcgtggtgaagctgctgaccaagccctgggatgtgatccctatggtgacacagctggccatgaccgacacaacccctttcggccagcagagagtgtttaaggagaaggtggacaccaggacacctcagccaaagcccggcacccgcatgatcatgaccatgacagccaactggctgtgggccctgctgggcaagaagaagagcccaaggctgtgcacccgcgaggagttcatctctaaggtgcgcagcaacgcagcaatcggagccgtgtttcaggaggagcagggatggacctccgcctctgaggccgtgaatgatagccggttctgggagctggtggacaaggagagagccctgcaccaggagggcaagtgcgagtcctgcgtgtacaatatgatgggcaagcgggagaagaagctgggcgagtttggaagggcaaagggctctcgcgccatctggtatatgtggctgggcgccagattcctggagtttgaggccctgggcttcctgaacgaggatcactggtttagccgggagaatagctggtccggagtggagggagagggcctgcacagactgggctacatcctggaggacatcgataagaaggacggcgatctgatctatgcagacgataccgcaggatgggacaccaggatcacagaggacgatctgctgaacgaggagctgatcaccgagcagatggccccccaccacaagacactggccaaggccatcttcaagctgacctatcagaataaggtggtgaaggtgctgcggcctacaccaaagggcgccgtgatggacatcatctctcggaaggaccagagaggcagcggacaagtgggcacctacggcctgaacacctttacaaatatggaggtgcagctgatcagacagatggaggccgagggcgtgatcacccaggacgatatgcagaacccacggggcctgaaggagagagtggagaagtggctgaaggagtgcggcgtggataggctgaagcgcatggccatcagcggcgacgattgcgtggtgaagcccatcgacgagaggttctctaccagcctgctgtttctgaacgatatgggcaaggtgcgcaaggacatcccacagtgggagccctccaagggctggaagaattggcaggaggtgccattctgctctcaccacttccacaagatctttatgaaggatggccggagcctggtggtgccctgtagaaaccaggacgagctgatcggaagggcaagaatctctcagggagcaggatggagcctgagagagacagcctgcctgggcaaggcctacgcccagatgtggtccctgatgtatttccacaggcgcgatctgcggctggcctctatggccatctgtagcgccgtgcctacagagtggtttccaacctccagaacaacctggtctatccacgcccaccaccagtggatgacaaccgaggacatgctgaaagtgtggaatagggtgtggatcgaggataacccaaatatgaccgacaagacacccgtgcactcttgggaggacatcccctatctgggcaagagggaggacctgtggtgcggatccctgatcggcctgtctagccgcgccacctgggccaagaacatccacaccgccatcacacaggtgcgcaatctgatcggcaaggaggagtacgtggattacatgcccgctatgaaaagatactccgctccatttgaaagtgagggggtcctgtgattattgacaacaaacaccaaagagaccattgaagtcaggccacttgtgccacggcttgagcaaaccgtgctgcctgtagctccgccaataatgggaggcgtaaaattcccagggaggccatgcgccacggaagctgtacgcgtggcatattggactagcggttagaggagacccctcccatcactgacaaaacgcagcaaaaaagggggcccgaagccaggaggaagctgtacttctggtggaaggactagaggttagaggagacccccccaacacaaaaacagcatattgacgctgggaaagaccagagatcctgctgtctctgcaacatcaatccaggcacagagcgccacgagatggattggtgttgttgaatcaacaggttct

SEQ ID NO: 32 - DNA, 10164 bp, synthetic construct
  source 1..10164: mol_type = other DNA
atgaaccaacgaaaaaaggtggttagaccacctttcaatatgctgaaacgcgagagaaaccgcgtatcaacccctcaggggctggtcaagaggttctccaccggcctgttttctggcaagggccctctgaggatggtgctggccttcatcacatttctgcgcgtgctgagcatcccacctaccgcaggcatcctgaagcggtggggacagctgaagaagaacaaggccatcaagatcctgatcggcttcaggaaggagatcggccgcatgctgaacatcctgaatcggagaaggcgcagcacaatgaccctgctgtgcctgatcccaaccgtgatggccttccacctgtccacacgggacggcgagcctctgatgatcgtggccaagcacgagcggggcagaccactgctgtttaagaccacagagggcatcaataagtgtaccctgatcgctatggacctgggcgagatgtgcgaggacacagtgacctacaagtgtcccctgctggtgaacaccgagcctgaggacatcgattgctggtgtaatctgacatccacctgggtcatgtatggcacatgcacccagtctggcgagcggagaagggagaagcggtccgtggccctgaccccacactctggaatgggcctggagacacgggccgagacatggatgagctccgagggagcatggaagcacgcacagagggtggagagctggattctgaggaacccaggattcgcactgctggccggctttatggcctacatgatcggccagaccggcatccagaggacagtgttctttgtgctgatgatgctggtggcaccatcctatggcatgagatgcgtgggcgtgggcaatagagatttcgtggagggcgtgtctggaggagcatgggtggacctggtgctggagcacggaggatgcgtgaccacaatggcccagggcaagcctacactggattttgagctgaccaagaccacagccaaggaggtggccctgctgcggacctactgcatcgaggcctccatctctaacatcaccacagccaccagatgtcctacacagggcgagccataccttaaggaggagcaggaccagcagtatatctgccgccgggacgtggtggataggggatggggcaatggatgtggcctgttcggcaagggaggagtggtgacatgcgccaagttcctgtgctccggcaagatcaccggcaacctggtgcagatcgagaatctggagtataccgtggtggtgacagtgcacaacggcgatacccacgccgtgggcaacgacacatccaatcacggcgtgacagccaccatcacaccccggagcccttccgtggaggtgaagctgcccgattacggcgagctgaccctggactgcgagcctagatctggcatcgatttcaacgagatgatcctgatgaagatgaagaagaagacctggctggtgcacaagcagtggtttctggatctgcctctgccctggagcgccggagcagacacctccgaggtgcactggaattacaaggagaggatggtgacattcaaggtgccccacgcaaagaggcaggacgtgaccgtgctgggcagccaggagggagcaatgcactccgccctggccggagccaccgaggtggacagcggcgatggcaaccacatgttcgccggccacctgaagtgcaaggtgcggatggagaagctgagaatcaagggcatgtcctacacaatgtgcagcggcaagttttccatcgataaggagatggccgagacacagcacggcaccacagtggtgaaggtgaagtatgagggagcaggagcaccttgtaaggtgcctatcgagatccgggacgtgaacaaggagaaggtggtgggcagaatcatctctagcacccccttcgccgagaacaccaatagcgtgacaaatatcgagctggagccaccctttggcgatagctacatcgtgatcggagtgggcgactccgccctgacactgcactggttcagaaagggctcctctatcggcaagatgtttgagtccacctatcggggcgccaagaggatggctatcctgggcgagaccgcatgggacttcggcagcgtgggaggcctgtttaccagcctgggcaaggccgtgcaccaggtgttcggctccgtgtataccacaatgtttggcggcgtgtcttggatgatcagaatcctgatcggcttcctggtgctgtggatcggcaccaactctcgcaatacaagcatggccatgacctgcatcgccgtgggcggcatcacactgttcctgggctttaccgtgcaggccgatatgggctgcgtggtgagctggaacggcaaggagctgaagtgtggctccggcatcttcgtggtggacaatgtgcacacctggacagagcagtacaagtttcagccagagtctccagcaaggctggccagcgccatcctgaacgcccacaaggatggcgtgtgcggcatcaggagcaccacacgcctggagaatgtgatgtggaagcagatcacaaacgagctgaattatgtgctgtgggagggaggacacgatctgaccgtggtggcaggcgacgtgaagggcgtgctgaccaagggcaagagggccctgacacctccagtgaacgacctgaagtactcctggaagacatggggcaaggccaagatcttcacccccgaggcccgcaattctacatttctgatcgacggccccgataccagcgagtgccctaacggcagaagggcctggaatttcctggaggtggaggattatggcttcggcatgtttaccacaaacatctggatgaagtttagggagggcagctccgaggtgtgcgaccacaggctgatgtccgccgccatcaaggatcagaaggccgtgcacgccgacatgggctactggatcgagtctagcaagaatcagacatggcagatcgagaaggcctctctgatcgaggtgaagacctgcctgtggcctaagacccacacactgtggagcaacggcgtgctggagtctcagatgctgatcccacggagctacgccggacccttctcccagcacaattacagacagggatatgcaacccagacagcaggaccctggcacctgggcaagctggagatcgattttggcgagtgccctggcaccacagtgaccatccaggaggactgtgatcacaggggaccatccctgcgtacgacaaccgcctctggcaagctggtgacccagtggtgctgtaggagctgcacaatgccacctctgcgcttcctgggagaggacggctgttggtatggcatggagatccggcccctgtctgagaaggaggagaacatggtgaagagccaggtgaccgcaggacagggcacctccgagacattctctatgggcctgctgtgcctgacactgtttgtggaggagtgtctgcgccggagagtgaccagaaagtacatgatgctggtggtggtcatcaccttctgtgccatcatcctgggcggcctgacctggatggatctgctgagggccctgatcatgctgggcgacaccatgtccggaaggatcggaggacagatccacctggccatcatggccgtgttcaagatgtcccctggctacgtgctgggcgtgtttctgcggaagctgaccagccgggagacagccctgatggtcatcggcatggccatgacaaccgtgttctctatcccacacgacctgatggagctgatcgatggcatcagcctgggcctgatcctgctgaggatcgtgacccacttcgacaacacccaagtgggcaccctggccctgagcctgaccttcatccggagcacaacccctctggtcatggcctggagaaccatcatggccgtgttctttgtggtgaccctgatcccactgtgccgcacatcctgtctgcagaagcagtctcactgggtggagatcacagccctgatcctgggagcacaggccctgcccgtgtacctgatgaccctgatgaagggcgcctccaggcgctcttggccactgaacgagggcatcatggcagtgggcctggtgagcctgctgggctccgccctgctgaagaatgatgtgccactggccggacctatggtggcaggaggcctgctgctggccgcctacgtgatgagcggctcctctgccgacctgtccctggagaaggccgccaacgtgcagtgggacgagatggccgacatcaccggcagctcccccatcatcgaggtgaagcaggacgaggatggctctttcagcatcagggatgtggaggagacaaatatgatcacactgctggtgaagctggccctgatcaccgtgagcggcctgtaccctctggccatcccagtgacaatggccctgtggtatatctggcaggtgaagacccagcggagcggcgccctgtgggacgtgccatctcctgcagcaacccagaaggccacactgagcgagggcgtgtatcggatcatgcagagaggcctgttcggcaagacccaagtgggcgtgggcatccacatggagggcgtgtttcacacaatgtggcacgtgaccaggggctccgtgatctgccacgagacaggccgcctggagccatcctgggcagacgtgcggaacgatatgatctcttacggcggaggatggaggctgggcgacaagtgggataaggaggaggatgtgcaggtgctggccatcgagcccggcaagaatcctaagcacgtgcagaccaagcctggcctgttcaagaccctgacaggagagatcggagcagtgaccctggactttaagcctggtacctccggctctccaatcatcaacaagaagggcaaagtgatcggcctgtacggcaatggcgtggtgacaaagagcggcgattacgtgagcgccatcacccaggcagagaggatcggagagccagactatgaggtggacgaggacatcttccggaagaagcggctgacaatcatggatctgcaccctggcgccggcaagaccaagagaatcctgccaagcatcgtgcgcgaggccctgaagcggagactgcggacactgatcctggcaccaaccagagtggtggcagcagagatggaggaggccctgaggggcctgccaatccgctaccagacccctgccgtgaagtccgagcacacaggcagagagatcgtggacctgatgtgccacgccaccttcacaaccaggctgctgtctagcacacgcgtgccaaactacaatctgatcgtgatggacgaggcccactttacagatccctgtagcgtggccgccagaggctatatctccaccagagtggagatgggagaggcagcagcaatcttcatgaccgccacaccacccggcagcatcgatccatttccccagagcaactcccctatcgaggacatcgagcgggagatcccagagagatcttggaatacaggcttcgactggatcaccgattatcagggcaagacagtgtggtttgtgcccagcatcaaggccggcaacgacatcgccaattgcctgaggaagtctggcaagcgcgtgatccagctgagccggaagaccttcgatacagagtaccctaagaccaagctgacagactgggatttcgtggtgacaaccgacatctccgagatgggcgccaactttcgggccggcagagtgatcgatccaaggcgctgtctgaagcccgtgatcctgacagacggaccagagagagtgatcctggcaggacctatcccagtgacccctgcctccgccgcacagcggagaggcaggatcggccgcaatccagcccaggaggacgatcagtacgtgttctctggcgatcccctgaagaacgacgaggatcacgcccactggaccgaggccaagatgctgctggacaatatctatacccccgagggcatcatccctacactgtttggcccagagagggagaagacacaggcaatcgacggagagttcaggctgaggggagagcagcgcaagacctttgtggagctgatgaggaggggcgatctgcccgtgtggctgagctacaaggtggcctctgccggcatcagctataaggacagggagtggtgcttcacaggcgagcgcaacaatcagatcctggaggagaacatggaggtggagatctggacccgggagggcgagaagaagaagctgcggcccaagtggctggacgccagagtgtacgccgaccctatggccctgaaggacttcaaggagtttgcctccggcagaaagtctatcaccctggacatcctgaccgagatcgccaccctgcctacatacctgtcctctaaggccaagctggccctggacaacatcgtgatgctgcacacaaccgagaagggcggcagggcctatcagcacgccctgaatgagctgccagagagcctggagacactgatgctggtggccctgctgggcgccctgaccgcaggcatctttctgttctttatgcagggcaagggcatcggcaagctgagcatgggcctgatcgccatcgcagtggcctccggcctgctgtgggtggcagagatccagccacagtggatcgcagcctccatcatcctggagttctttctgatggtgctgctgatccccgagcctgagaagcagcgcacccctcaggataaccagctgatctacgtgatcctgaccatcctgacaatcatcggcctgatcgccgccaatgagatgggcctgatcgagaagaccaagacagacttcggcttttaccaggtgaagaccgagacaaccatcctggacgtggatctgaggcccgccagcgcctggacactgtatgcagtggccacaaccatcctgacccctatgctgcgccacaccatcgagaacacaagcgccaatctgtccctggccgcaatcgcaaaccaggcagccgtgctgatgggcctgggcaagggatggccactgcacaggatggacctgggcgtgcctctgctggctatgggctgctactctcaagtgaatcccacaaccctgaccgccagcctggtcatgctgctggtgcactatgccatcatcggacctggcctgcaggcaaaggcaaccagggaggcacagaagagaacagcagcaggcatcatgaagaacccaacagtggatggcatcaccgtgatcgacctggagcccatcagctacgaccctaagttcgagaagcagctgggccaggtcatgctgctggtgctgtgcgtgggccagctgctgctgatgagaacaacctgggcactgtgcgaggtgctgaccctggccacaggaccaatcatgacactgtgggagggcaaccccggccggttttggaatacaaccatcgccgtgtccaccgccaacatcttcagaggctcttatctggcaggagcaggcctggccttttccctgatcaagaatgcccagacacctaggagaggcaccggcacaaccggagagacactgggagagaagtggaagaggcagctgaacagcctggaccgcaaggagttcgaggagtacaagcggtccggcatcctggaggtggatagaaccgaggcaaagagcgccctgagggacggctccaagatcaagcacgccgtgagccggggcagctccaagatcaggtggatcgtggagcgcggcatgatcaagcccaagggcaaggtggtggatctgggatgcggaagaggaggatggtcctactatatggccacactgaagaacgtgaccgaggtgaagggctacacaaagggaggacctggacacgaggagccaatccctatggccacctacggctggaatctggtgaagctgcacagcggcgtggacgtgttctataagccaacagagcaggtggacaccctgctgtgcgacatcggcgagtctagctccaaccccaccatcgaggagggccggacactgagagtgctgaagatggtggagccttggctgtctagcaagccagagttttgcatcaaggtgctgaatccttacatgccaaccgtgatcgaggagctggagaagctgcagaggcgccacggcggctctctggtgcggtgtccactgagcagaaactccacacacgagatgtattgggtgtctggcgccagcggcaacatcgtgtcctctgtgaataccatcagcaagatgctgctgaataggttcacaacccggcacagaaagcctacatacgagaaggacgtggatctgggagcaggcacccgctctgtgagcaccgagacagagaagccagatatgaccatcatcggccggagactgcagaggctgagggaggagcacaaggagacatggcactacgaccaggagaacccttataggacctgggcctaccacggcagctatgaggcaccatccacaggcagcgccagcagcatggtgaatggcgtggtgaagctgctgaccaagccctgggatgtgatccctatggtgacacagctggccatgaccgacacaacccctttcggccagcagagagtgtttaaggagaaggtggacaccaggacacctcagccaaagcccggcacccgcatgatcatgaccatgacagccaactggctgtgggccctgctgggcaagaagaagagcccaaggctgtgcacccgcgaggagttcatctctaaggtgcgcagcaacgcagcaatcggagccgtgtttcaggaggagcagggatggacctccgcctctgaggccgtgaatgatagccggttctgggagctggtggacaaggagagagccctgcaccaggagggcaagtgcgagtcctgcgtgtacaatatgatgggcaagcgggagaagaagctgggcgagtttggaagggcaaagggctctcgcgccatctggtatatgtggctgggcgccagattcctggagtttgaggccctgggcttcctgaacgaggatcactggtttagccgggagaatagctggtccggagtggagggagagggcctgcacagactgggctacatcctggaggacatcgataagaaggacggcgatctgatctatgcagacgataccgcaggatgggacaccaggatcacagaggacgatctgctgaacgaggagctgatcaccgagcagatggccccccaccacaagacactggccaaggccatcttcaagctgacctatcagaataaggtggtgaaggtgctgcggcctacaccaaagggcgccgtgatggacatcatctctcggaaggaccagagaggcagcggacaagtgggcacctacggcctgaacacctttacaaatatggaggtgcagctgatcagacagatggaggccgagggcgtgatcacccaggacgatatgcagaacccacggggcctgaaggagagagtggagaagtggctgaaggagtgcggcgtggataggctgaagcgcatggccatcagcggcgacgattgcgtggtgaagcccatcgacgagaggttctctaccagcctgctgtttctgaacgatatgggcaaggtgcgcaaggacatcccacagtgggagccctccaagggctggaagaattggcaggaggtgccattctgctctcaccacttccacaagatctttatgaaggatggccggagcctggtggtgccctgtagaaaccaggacgagctgatcggaagggcaagaatctctcagggagcaggatggagcctgagagagacagcctgcctgggcaaggcctacgcccagatgtggtccctgatgtatttccacaggcgcgatctgcggctggcctctatggccatctgtagcgccgtgcctacagagtggtttccaacctccagaacaacctggtctatccacgcccaccaccagtggatgacaaccgaggacatgctgaaagtgtggaatagggtgtggatcgaggataacccaaatatgaccgacaagacacccgtgcactcttgggaggacatcccctatctgggcaagagggaggacctgtggtgcggatccctgatcggcctgtctagccgcgccacctgggccaagaacatccacaccgccatcacacaggtgcgcaatctgatcggcaaggaggagtacgtggattacatgcccgctatgaaaagatactccgctccatttgaaagtgagggggtcctgtga

SEQ ID NO: 33 - DNA, 11022 bp, synthetic construct
  source 1..11022: mol_type = other DNA
agtagttcgcctgtgtgagctgacaaacttagtagtgtttgtgaggattttgaacaattaacacagtgcgagctgtttcttagcacgaagatctcgatgtctaagaaaccaggagggcccggcaaaagccgggctgtcaatatgctaaaacgcggaatgccccgcgtgttgtccttgactggactgaagagggcaatgttgagcctgattgacggtagggggcccacacggtttgtgttggctctcttggcgttttttaggttcacggcaattgctccgacccgagcagtgctggatcgatggagaagtgtgaacaaacaaacagcgatgaaacatctcctgagtttcaagaaggaactaggaaccttgaccagtgctatcaaccggcggagctcaaaacagaagaagagaggaggaaagaccggaattgcattcatgattggcttgattgctggcgtgggagcagtcactctctccaactttcaagggaaggtgatgatgacggtgaacgctactgacgtcacagacattatcacgataccaacggccgctggaaagaacctgtgcattgtcagagctatggatgtggggcacatgtgtgatgatactatcacctatgaatgtccagtgttgtcggccggaaatgatccagaagacattgactgctggtgcacgaagttagcagtctacgttaggtatggaagatgcaccaagacacgacactcaagacgcagcagaaggtcactaacagtgcagacgcatggagagagcaccctatcgaacaaaaagggggcctggatggacagcaccaaggctacaaggtacttggtaaaaacagaatcatggatcttgagaaaccctggatatgccttggtggcagctgtcattggatggatgctcggaagcaacaccatgcagcgtgtcgtgtttgccgtgttactgcttttggtagctccagcttacagctttaactgtcttggaatgagcaacagagatttcctggagggagtgtccggagcaacatgggtggacttggtccttgaaggtgacagctgtgtgaccattatgtccaaggacaagcccaccatcgatgtgaagatgatgaacatggaggccgctaacttagcagaagtccgcagttattgctacttagccactgtcagtgaactctccaccaaggctgcgtgcccaaccatgggggaagcccataatgacaagcgggctgacccatcttttgtgtgcaaacaaggagtagtggatagaggttggggcaatgggtgcggactttttggtaaaggaagcatcgacacatgcgccaaatttgcctgttcaaccaaggcaacgggaaggactatcttaaaggagaacattaagtatgaggtggctatctttgtgcatggaccaactaccgtggaatcgcatgggaactacttcacgcaaaccggagctgctcaggctgggagatttagtatcacccccgcggcaccctcttacactcttaagctcggagagtatggagaagtaacagtggactgtgaaccacgctcagggatagacaccagtgcatactatgtgatgactgtcgggacaaagactttcttggtccaccgtgagtggtttatggacctcaacctcccctggagcagtgctgaaagtaatgtttggaggaacagagagacgctaatggagtttgaagaaccacacgctacgaagcaatctgtgatagcattgggctctcaagagggagccctgcatcaagctctggcaggagccattcctgtggaattttcaagcaacactgtcaagctgacgtcaggccacctgaagtgtagggtgaagatggaaaaattgcagctgaaggggacaacttatggcgtctgttcaaaggccttcagattccttgggactcccgcagacacgggccatggtactgtggtactggaactgcagtacacaggcacggatggaccctgcaagatacccatttcatcagtagcttcattgaatgacctaacgccagtgggcaggttagttaccgtcaacccctttgtctccgtgtcaacggccaatgctaaagtcctgattgagttggaaccaccctttggagattcgtacatagtggtgggaagaggagagcaacagatcaaccatcactggcacaagtctggaagtagcattggcaaagctttcacagccaccctcaagggagctcagagactagcagctctgggagacacagcttgggactttggatcggttggaggagtgtttacctccgtgggaaaggctgtccatcaagtatttggtggagcattccgctcattgtttggaggcatgtcttggataactcagggtctgctgggggccctcctattgtggatgggtattaacgctcgtgatagatccatagccctcacgttcctcgcggttggaggagttctgctctttctctccgtgaacgtgcatgctgatactggatgtgccatagatataagtcggcaagagttgaggtgtggcagcggagtatttatacacaatgatgtggaagcttggatggaccgatacaagtactaccctgaaacaccacaaggtctagctaagatcattcaaaaggctcacaaggaaggagtgtgcggtctacgatcagtttctagattggaacaccaaatgtgggaagcagtgaaggatgaactaaacactcttttgaaggaaaatggtgtggaccttagtattgtggttgagaaacaggaggggatgtacaaatcagcacctagacgcctgactgccaccactgagaaactggaaataggctggaaagcctgggggaagagcattctgttcgcaccagaactggccaacaacacttttgtgattgatggtccggagaccaaggagtgtccaacccagaaccgtgcctggaacagcttggaggtggaagattttggattcggcctcaccagcactcggatgttcttgagggtcagagaaagcaacacgactgaatgtgactcaaagatcatcgggacagccgtcaagaataacttggcgatccatagcgatctatcctactggattgaaagcaggtttaatgacacgtggaagctcgaaagggcggtcctgggtgaagtcaaatcatgcacgtggccggaaacacataccctgtggggtgacggggtccttgagagtgacctaataataccaatcacgctagcgggaccgcgaagcaaccacaaccggaggcctgggtataaaacacaaagccagggtccatgggatgaaggtcgagtggagattgactttgattactgtccagggacaacggtcactctgagtgagagctgcgggcatcgtggacctgccacccgcaccactacagagagtggaaagctgataacggactggtgctgtaggagctgcaccttacctccattgcgctaccagacagacaatggttgttggtatggcatggagattaggccacagagacatgatgaaaaaactcttgtgcagtcacaggtgaatgcctacaacgctgacatgattgatccttttcagctgggccttctggtcgtgttcttggccacccaggaggtccttcgcaagaggtggacagccaagatcagcatgccagccatactgattgccctgctagttctagtgtttgggggcatcacttacactgatgtgttacgctatgtcattctggtgggggcggcctttgcagaatccaactcaggaggagatgtggtgcatctggcgctcatggcaaccttcaagatacaaccagtgttcatggtagcatcatttctcaaggcgagatggaccaaccaagaaaacattctgctgatgttggcagctgctttcttccaaatggcttactatgatgcccggcaaattttgctttgggaaatgcctgatgtattgaattcattggcagtggcttggatgatattgagagcgataacgttcaccacaacatctaatgtggtcgtcccgctgctggccttgttaacacctggattgagatgcctaaacctggatgtgtacaggatcctgctactgatggttggaataggcagtttgatcagggaaaaaagaagtgcagctgcaaaaaagaaaggagccagtctgctatgtttggctctagcctcaacaggattttttaaccccatgatccttgctgctggacttgtcgcatgtgatcccaatcgcaagcgggggtggcctgcaactgaagtgatgacagctgtcggcttaatgtttgccatcgttggagggcttgcagaactggacatagactccatggccattccaatgactatcgcagggctcatgtttgctgcttttgtgatctctggaaaatcgaccgacatgtggattgagaggacagcggacatctcctgggagggtgatgcggaaatcacaggttccagtgaaagagttgatgttcggcttgacgatgacgggaacttccagctcatgaatgatccaggagcaccttggaaaatatggatgctccgtatggcttgcctggcaatcagcgcgtacaccccttgggctattttgccttcagtagttggattttggataactctccaatacacaaagagaggaggtgtgctgtgggacactccctctccaaaggagtacaagagaggggacacgaccactggtgtctataggatcatgactcgtggattacttggtagttaccaagcaggagcaggcgtgatggttgaaggtgttttccacaccctctggcacacgacaaaaggagccgctctgatgagcggagaaggccgcctggacccatattggggcagcgtcaaggaggatcgactttgttatggtggaccctggaaactgcagcacaagtggaatgggcaagatgaggtgcaaatgattgtggtggaaccagggaagaatgtcaagaacgtccagactaagccgggggtgttcaaaacacctgaaggggagatcggggccgtgactctggatttccccactggaacatcaggctcgcccatagtggacaaaaacggtgatgtgattgggctttatggcaacggagtcataatgcccaatggctcatacataagcgcgatagtgcaaggtgaaaggatggatgagccggttcccgccggattcgaacctgagatgttgaggaaaaaacagatcaccgttttggatcttcaccctggtgctggtaaaacaaggaggattctgccacagatcatcaaagaggctataaacaggaggctgaggacggctgtgctggcgccaactagggttgtggccgctgagatggctgaagccctaagaggattgcctatccgataccaaacatctgcggtggccagagagcacaatggaaatgagatcgtcgacgtcatgtgccatgcaaccctcacccataggctgatgtctcctcatagggtgcctaattacaacctatttgtgatggacgaggcccacttcaccgacccagccagcatcgcggctagaggatacatttccacgagagttgagctgggggaggcagctgcaatattcatgactgccaccccaccaggtacctcagacccatttccagagtccaatgcaccaatatccgacttacagaccgaaatcccggaccgagcctggaactcagggtatgagtggattacagaatatatcgggaagacggtttggtttgtgcctagtgtgaagatgggaaatgagatagccctctgtctgcagcgcgctggcaaaaaagtcatccagctaaacagaaagtcgtacgagacagagtatccaaaatgcaagaacgatgattgggactttgtcgtcacaacagatatatctgagatgggagcaaactttaaggcaagcagggtgattgacagccggaagagtgtgaaaccgactatcatcacggaaggagagggaagagtgatcttgggggaaccatccgctgtgacggcagccagtgcagcccagagacgaggacgcattggtaggaatccatcacaagttggagatgagtactgctatggagggcacacgaatgaggatgactcgaactgtgctcactggactgaggcacgaatcatgctcgataacatcaacatgccaaacggattgattgctcaattctaccaaccagagcgcgagaaggtatacaccatggacggggaataccgacttagaggagaggagaggaaaaacttcctggaattgttgagaactgcagacttgccagtatggctagcttataaggtggcagcagctggggtgtcatatcatgaccggaggtggtgttttgatggccctaggacaaatacaatccttgaagacaacaatgaagtggaagtcatcacaaagcttggtgaaaggaagattctgaggccacgctggattgatgcaagggtgtactcagaccatcaggcgctgaaatcattcaaggacttcgcctcagggaagcgctctcaaataggttttatcgaggtccttggaaagatgcctgaacatttcatggggaagacatgggaagcactcgacaccatgtatgttgtagccactgcagagaaaggaggaagagctcacagaatggctttggaggagctaccagacgccctccaaacaatagctctgatcgctctgttgagtgtgatgaccatgggagtgttttttcttctcatgcagaggaagggcatcggaaagataggcctgggaggcgttgtcctgggagccgcaacctttttctgttggatggctgaagtaccaggaacgaagattgccggaatgctgctgctttccctccttctgatgatcgtgttgattcctgagccagagaagcaacgctcgcagacagacaaccagctagctgtgttcctgatttgcgtgttgacccttgtgggtgcggtggcagccaatgagatgggttggctggacaagaccaagagtgacataagcggtctgtttgggcaaagaattgaaaccaaggagaattttagcattggggagttccttttggacctgaggccggcaacggcttggtcactgtatgctgtgactacagcagttctcactcccttgctaaagcacttgatcacgtcagactacatcaacacctcattgacctcaataaatgttcaagctagtgcgctattcacgctcgcgcgaggcttcccttttgtcgatgttggagtatcggctctcctgctagcagccggatgctggggacaagtcactctcaccgtgacggtgacatcagcaacacttctgttctgccattatgcctacatggtacctggatggcaggctgaggcaatgcgctcagcccagcgacgaacagccgctggaatcatgaaaaacgctgtggtagacggcatcgtggccacggacgttccagagctagagcgtaccacacccatcatgcagaagaaggttggacaagttatgctgattttggtgtctcttgccgcattggtggtaaacccgtctgtgaagacagtgcgggaagccggaattctgattacggcagcagctgttaccctctgggagaacggagcaagctctgtgtggaacgcaacaaccgccataggactttgtcacatcatgcgcggaggctggttatcgtgtttatccataacatggactcttgtaaaaaacatggaaaaaccagggctgaagagaggtggggcaaaaggacgcaccttgggggaggtttggaaagaaagacttaaccagatgacgaaagaagaattcatcaggtaccgtaaagaagccatcactgaagttgaccgctcagcagcaaaacacgctaggaaggaaaggaatatcactggagggcatccagtttctagaggcacggcaaagctaagatggctggtcgagaggaggtttcttgagccggtcggaaaagtgatcgaccttggatgtggaagaggcggctggtgttattacatggccacacaaaaaagagtccaagaagtcagagggtacacaaaaggtggtcccggacatgaagagccccaactagtgcagagctatggatggaacattgtcaccatgaagagtggggtggatgtgttctataggccttctgaatgttgtgacactctcctttgtgatatcggagagtcctcatcaagtgctgaagttgaagaacatagaacgctacgagtccttgaaatggtggaagactggttgcatcgagggccaaaggaattttgtgtgaaggtactgtgcccctacatgccaaaggtcatagaaaagatggagctgctccaacgccggtatggcgggggattggttaggaacccactctcacggaattccacacatgaaatgtattgggtgagtcgagcctcaggcaatgtggtgcactcagtgaacatgaccagccaggtactcttaggaaggatggagaagaagacctggaagggacctcagtacgaagaagacgtgaacttgggaagcggaacgagagcagtgggaaaacctctactcaactcagacaccagcaagataaagaacaggattgaacgacttaggcgtgagtacagctcgacatggcatcatgatgagaaccacccatatagaacctggaactaccacggtagctacgaagtgaagccaacaggctctgcaagctcactggtcaatggagtggtcaggctcctctcgaaaccatgggacaccatcacaaatgtcaccacaatggccatgacggacaccaccccttttggacaacagcgagtgttcaaagagaaggtggacacgaaagctccggaaccgccagaaggagtgaagtatgtgctcaatgaaaccaccaactggttgtgggcgttcctggcacgagaaaagcgtcccagaatgtgctcgcgagaggaatttataaggaaggtcaatagtaatgcagctctgggcgccatgtttgaggagcagaatcaatggaggagtgctagagaagcggttgaagatccaaaattctgggaaatggtggatgaagagcgtgaggcgcacttacgcggagaatgtcatacttgcatttacaacatgatgggaaagagggagaaaaaacccggagagtttgggaaagccaagggaagcagggccatctggtttatgtggctgggagctcgcttcctagagtttgaggctctgggctttcttaatgaggaccactggcttggaagaaagaactcggggggcggggtcgagggtctgggcctccagaaattaggctacatcctgcgtgaagttggcacccgacccggaggcagaatctacgctgatgacacagccggttgggacacccgcatcacaagagctgacctggagaatgaagccaaggttcttgagttgttggacggggagcaccggcgcctggccagggccatcattgagctcacctatcgccacaaagtagtgaaggtaatgcgcccggctgctgatggaagaaccgtcatggacgtcatctccagggaagaccagagaggaagtgggcaagttgtcacctacgctctaaacacctttaccaacctggctgtccagttggtgagaatgatggaaggagagggtgtgatcggcccagatgatgtggagaaactcacaaaggggaaagggcccaaggttagaacctggctgtctgagaatggggaggaaagactcagccgcatggctgtcagtggagatgactgtgtggtaaagcccttggatgatcgctttgccacctctctccactttctcaacgccatgtcaaaggtgcgcaaggacatccaagagtggaaaccatcaaccggatggtatgattggcagcaagttccattctgttcaaaccacttcactgaactgatcatgaaagatggaagaacactggtgactccatgccgagggcaggatgagttagtgggcagagctcgcatctccccaggggctggatggaatgttcgagacactgcttgcttagccaaatcttatgctcagatgtggttgctcctgtacttccacagaagagatctgcggttgatggccaacgccatctgctctgccgtacctgtaaactgggtccctactggaagaaccacatggtccatccacgctggaggagagtggatgacaacggaagacatgctggaggtctggaatcgtgtctggattgaggaaaatgaatggatggaggacaaaaccccagtggagaagtggagtgatgttccatactctggcaaacgagaggacatttggtgtggcagcctgattggcacaagagcccgggccacgtgggcagaaaacattcaagtggccatcaaccaagtcagatcaataattggagatgagaaatatgtggattacatgagttcattgaagagatatgaagacacaacattggttgaggatacagtattgtaaatactttgttaattgtaaataaatattgttattatgtgtagaagtttagctttataatagtgtttagtgtgtttagagttagaaaaattttagtgaggaagtcaggccggaaaattcccgccaccggaagttgagtagacggtgctgcctgcgactcaaccccaggaggactgggtgaacaaagctgcgaagtgatccatgtaagccctcagaaccgtctcggaaagaggaccccacatgttgtagcttcaaggcccaatgtcagaccacgccatggcgtgccactctgcggagagtgcagtctgcgacagtgccccaggaggactgggtgaacaaaggcgaatcaacgtcccacgcggccctagctctggcaatggtgttaaccagagtgaaaggactagaggttagaggagaccccgcgttctgaagtgcacggcccagcctggctgaagctgtaggtcaggggaaggactagaggttagtggagaccccgtgccgcaaaacaccacaacaacacagcatattgacacctgggatagactaggagatcttctgctctgcacaaccagccacacggcacagtgcgccgacaatggtggctggtggtgcgagaacacaggatct

SEQ ID NO: 34 - DNA, 10302 bp, synthetic construct
  source 1..10302: mol_type = other DNA
atgtctaagaaaccaggagggcccggcaaaagccgggctgtcaatatgctaaaacgcggaatgccccgcgtgttgtccttgactggactgaagagggcaatgttgagcctgattgacggtagggggcccacacggtttgtgttggctctcttggcgttttttaggttcacggcaattgctccgacccgagcagtgctggatcgatggagaagtgtgaacaaacaaacagcgatgaaacatctcctgagtttcaagaaggaactaggaaccttgaccagtgctatcaaccggcggagctcaaaacagaagaagagaggaggaaagaccggaattgcattcatgattggcttgattgctggcgtgggagcagtcactctctccaactttcaagggaaggtgatgatgacggtgaacgctactgacgtcacagacattatcacgataccaacggccgctggaaagaacctgtgcattgtcagagctatggatgtggggcacatgtgtgatgatactatcacctatgaatgtccagtgttgtcggccggaaatgatccagaagacattgactgctggtgcacgaagttagcagtctacgttaggtatggaagatgcaccaagacacgacactcaagacgcagcagaaggtcactaacagtgcagacgcatggagagagcaccctatcgaacaaaaagggggcctggatggacagcaccaaggctacaaggtacttggtaaaaacagaatcatggatcttgagaaaccctggatatgccttggtggcagctgtcattggatggatgctcggaagcaacaccatgcagcgtgtcgtgtttgccgtgttactgcttttggtagctccagcttacagctttaactgtcttggaatgagcaacagagatttcctggagggagtgtccggagcaacatgggtggacttggtccttgaaggtgacagctgtgtgaccattatgtccaaggacaagcccaccatcgatgtgaagatgatgaacatggaggccgctaacttagcagaagtccgcagttattgctacttagccactgtcagtgaactctccaccaaggctgcgtgcccaaccatgggggaagcccataatgacaagcgggctgacccatcttttgtgtgcaaacaaggagtagtggatagaggttggggcaatgggtgcggactttttggtaaaggaagcatcgacacatgcgccaaatttgcctgttcaaccaaggcaacgggaaggactatcttaaaggagaacattaagtatgaggtggctatctttgtgcatggaccaactaccgtggaatcgcatgggaactacttcacgcaaaccggagctgctcaggctgggagatttagtatcacccccgcggcaccctcttacactcttaagctcggagagtatggagaagtaacagtggactgtgaaccacgctcagggatagacaccagtgcatactatgtgatgactgtcgggacaaagactttcttggtccaccgtgagtggtttatggacctcaacctcccctggagcagtgctgaaagtaatgtttggaggaacagagagacgctaatggagtttgaagaaccacacgctacgaagcaatctgtgatagcattgggctctcaagagggagccctgcatcaagctctggcaggagccattcctgtggaattttcaagcaacactgtcaagctgacgtcaggccacctgaagtgtagggtgaagatggaaaaattgcagctgaaggggacaacttatggcgtctgttcaaaggccttcagattccttgggactcccgcagacacgggccatggtactgtggtactggaactgcagtacacaggcacggatggaccctgcaagatacccatttcatcagtagcttcattgaatgacctaacgccagtgggcaggttagttaccgtcaacccctttgtctccgtgtcaacggccaatgctaaagtcctgattgagttggaaccaccctttggagattcgtacatagtggtgggaagaggagagcaacagatcaaccatcactggcacaagtctggaagtagcattggcaaagctttcacagccaccctcaagggagctcagagactagcagctctgggagacacagcttgggactttggatcggttggaggagtgtttacctccgtgggaaaggctgtccatcaagtatttggtggagcattccgctcattgtttggaggcatgtcttggataactcagggtctgctgggggccctcctattgtggatgggtattaacgctcgtgatagatccatagccctcacgttcctcgcggttggaggagttctgctctttctctccgtgaacgtgcatgctgatactggatgtgccatagatataagtcggcaagagttgaggtgtggcagcggagtatttatacacaatgatgtggaagcttggatggaccgatacaagtactaccctgaaacaccacaaggtctagctaagatcattcaaaaggctcacaaggaaggagtgtgcggtctacgatcagtttctagattggaacaccaaatgtgggaagcagtgaaggatgaactaaacactcttttgaaggaaaatggtgtggaccttagtattgtggttgagaaacaggaggggatgtacaaatcagcacctagacgcctgactgccaccactgagaaactggaaataggctggaaagcctgggggaagagcattctgttcgcaccagaactggccaacaacacttttgtgattgatggtccggagaccaaggagtgtccaacccagaaccgtgcctggaacagcttggaggtggaagattttggattcggcctcaccagcactcggatgttcttgagggtcagagaaagcaacacgactgaatgtgactcaaagatcatcgggacagccgtcaagaataacttggcgatccatagcgatctatcctactggattgaaagcaggtttaatgacacgtggaagctcgaaagggcggtcctgggtgaagtcaaatcatgcacgtggccggaaacacataccctgtggggtgacggggtccttgagagtgacctaataataccaatcacgctagcgggaccgcgaagcaaccacaaccggaggcctgggtataaaacacaaagccagggtccatgggatgaaggtcgagtggagattgactttgattactgtccagggacaacggtcactctgagtgagagctgcgggcatcgtggacctgccacccgcaccactacagagagtggaaagctgataacggactggtgctgtaggagctgcaccttacctccattgcgctaccagacagacaatggttgttggtatggcatggagattaggccacagagacatgatgaaaaaactcttgtgcagtcacaggtgaatgcctacaacgctgacatgattgatccttttcagctgggccttctggtcgtgttcttggccacccaggaggtccttcgcaagaggtggacagccaagatcagcatgccagccatactgattgccctgctagttctagtgtttgggggcatcacttacactgatgtgttacgctatgtcattctggtgggggcggcctttgcagaatccaactcaggaggagatgtggtgcatctggcgctcatggcaaccttcaagatacaaccagtgttcatggtagcatcatttctcaaggcgagatggaccaaccaagaaaacattctgctgatgttggcagctgctttcttccaaatggcttactatgatgcccggcaaattttgctttgggaaatgcctgatgtattgaattcattggcagtggcttggatgatattgagagcgataacgttcaccacaacatctaatgtggtcgtcccgctgctggccttgttaacacctggattgagatgcctaaacctggatgtgtacaggatcctgctactgatggttggaataggcagtttgatcagggaaaaaagaagtgcagctgcaaaaaagaaaggagccagtctgctatgtttggctctagcctcaacaggattttttaaccccatgatccttgctgctggacttgtcgcatgtgatcccaatcgcaagcgggggtggcctgcaactgaagtgatgacagctgtcggcttaatgtttgccatcgttggagggcttgcagaactggacatagactccatggccattccaatgactatcgcagggctcatgtttgctgcttttgtgatctctggaaaatcgaccgacatgtggattgagaggacagcggacatctcctgggagggtgatgcggaaatcacaggttccagtgaaagagttgatgttcggcttgacgatgacgggaacttccagctcatgaatgatccaggagcaccttggaaaatatggatgctccgtatggcttgcctggcaatcagcgcgtacaccccttgggctattttgccttcagtagttggattttggataactctccaatacacaaagagaggaggtgtgctgtgggacactccctctccaaaggagtacaagagaggggacacgaccactggtgtctataggatcatgactcgtggattacttggtagttaccaagcaggagcaggcgtgatggttgaaggtgttttccacaccctctggcacacgacaaaaggagccgctctgatgagcggagaaggccgcctggacccatattggggcagcgtcaaggaggatcgactttgttatggtggaccctggaaactgcagcacaagtggaatgggcaagatgaggtgcaaatgattgtggtggaaccagggaagaatgtcaagaacgtccagactaagccgggggtgttcaaaacacctgaaggggagatcggggccgtgactctggatttccccactggaacatcaggctcgcccatagtggacaaaaacggtgatgtgattgggctttatggcaacggagtcataatgcccaatggctcatacataagcgcgatagtgcaaggtgaaaggatggatgagccggttcccgccggattcgaacctgagatgttgaggaaaaaacagatcaccgttttggatcttcaccctggtgctggtaaaacaaggaggattctgccacagatcatcaaagaggctataaacaggaggctgaggacggctgtgctggcgccaactagggttgtggccgctgagatggctgaagccctaagaggattgcctatccgataccaaacatctgcggtggccagagagcacaatggaaatgagatcgtcgacgtcatgtgccatgcaaccctcacccataggctgatgtctcctcatagggtgcctaattacaacctatttgtgatggacgaggcccacttcaccgacccagccagcatcgcggctagaggatacatttccacgagagttgagctgggggaggcagctgcaatattcatgactgccaccccaccaggtacctcagacccatttccagagtccaatgcaccaatatccgacttacagaccgaaatcccggaccgagcctggaactcagggtatgagtggattacagaatatatcgggaagacggtttggtttgtgcctagtgtgaagatgggaaatgagatagccctctgtctgcagcgcgctggcaaaaaagtcatccagctaaacagaaagtcgtacgagacagagtatccaaaatgcaagaacgatgattgggactttgtcgtcacaacagatatatctgagatgggagcaaactttaaggcaagcagggtgattgacagccggaagagtgtgaaaccgactatcatcacggaaggagagggaagagtgatcttgggggaaccatccgctgtgacggcagccagtgcagcccagagacgaggacgcattggtaggaatccatcacaagttggagatgagtactgctatggagggcacacgaatgaggatgactcgaactgtgctcactggactgaggcacgaatcatgctcgataacatcaacatgccaaacggattgattgctcaattctaccaaccagagcgcgagaaggtatacaccatggacggggaataccgacttagaggagaggagaggaaaaacttcctggaattgttgagaactgcagacttgccagtatggctagcttataaggtggcagcagctggggtgtcatatcatgaccggaggtggtgttttgatggccctaggacaaatacaatccttgaagacaacaatgaagtggaagtcatcacaaagcttggtgaaaggaagattctgaggccacgctggattgatgcaagggtgtactcagaccatcaggcgctgaaatcattcaaggacttcgcctcagggaagcgctctcaaataggttttatcgaggtccttggaaagatgcctgaacatttcatggggaagacatgggaagcactcgacaccatgtatgttgtagccactgcagagaaaggaggaagagctcacagaatggctttggaggagctaccagacgccctccaaacaatagctctgatcgctctgttgagtgtgatgaccatgggagtgttttttcttctcatgcagaggaagggcatcggaaagataggcctgggaggcgttgtcctgggagccgcaacctttttctgttggatggctgaagtaccaggaacgaagattgccggaatgctgctgctttccctccttctgatgatcgtgttgattcctgagccagagaagcaacgctcgcagacagacaaccagctagctgtgttcctgatttgcgtgttgacccttgtgggtgcggtggcagccaatgagatgggttggctggacaagaccaagagtgacataagcggtctgtttgggcaaagaattgaaaccaaggagaattttagcattggggagttccttttggacctgaggccggcaacggcttggtcactgtatgctgtgactacagcagttctcactcccttgctaaagcacttgatcacgtcagactacatcaacacctcattgacctcaataaatgttcaagctagtgcgctattcacgctcgcgcgaggcttcccttttgtcgatgttggagtatcggctctcctgctagcagccggatgctggggacaagtcactctcaccgtgacggtgacatcagcaacacttctgttctgccattatgcctacatggtacctggatggcaggctgaggcaatgcgctcagcccagcgacgaacagccgctggaatcatgaaaaacgctgtggtagacggcatcgtggccacggacgttccagagctagagcgtaccacacccatcatgcagaagaaggttggacaagttatgctgattttggtgtctcttgccgcattggtggtaaacccgtctgtgaagacagtgcgggaagccggaattctgattacggcagcagctgttaccctctgggagaacggagcaagctctgtgtggaacgcaacaaccgccataggactttgtcacatcatgcgcggaggctggttatcgtgtttatccataacatggactcttgtaaaaaacatggaaaaaccagggctgaagagaggtggggcaaaaggacgcaccttgggggaggtttggaaagaaagacttaaccagatgacgaaagaagaattcatcaggtaccgtaaagaagccatcactgaagttgaccgctcagcagcaaaacacgctaggaaggaaaggaatatcactggagggcatccagtttctagaggcacggcaaagctaagatggctggtcgagaggaggtttcttgagccggtcggaaaagtgatcgaccttggatgtggaagaggcggctggtgttattacatggccacacaaaaaagagtccaagaagtcagagggtacacaaaaggtggtcccggacatgaagagccccaactagtgcagagctatggatggaacattgtcaccatgaagagtggggtggatgtgttctataggccttctgaatgttgtgacactctcctttgtgatatcggagagtcctcatcaagtgctgaagttgaagaacatagaacgctacgagtccttgaaatggtggaagactggttgcatcgagggccaaaggaattttgtgtgaaggtactgtgcccctacatgccaaaggtcatagaaaagatggagctgctccaacgccggtatggcgggggattggttaggaacccactctcacggaattccacacatgaaatgtattgggtgagtcgagcctcaggcaatgtggtgcactcagtgaacatgaccagccaggtactcttaggaaggatggagaagaagacctggaagggacctcagtacgaagaagacgtgaacttgggaagcggaacgagagcagtgggaaaacctctactcaactcagacaccagcaagataaagaacaggattgaacgacttaggcgtgagtacagctcgacatggcatcatgatgagaaccacccatatagaacctggaactaccacggtagctacgaagtgaagccaacaggctctgcaagctcactggtcaatggagtggtcaggctcctctcgaaaccatgggacaccatcacaaatgtcaccacaatggccatgacggacaccaccccttttggacaacagcgagtgttcaaagagaaggtggacacgaaagctccggaaccgccagaaggagtgaagtatgtgctcaatgaaaccaccaactggttgtgggcgttcctggcacgagaaaagcgtcccagaatgtgctcgcgagaggaatttataaggaaggtcaatagtaatgcagctctgggcgccatgtttgaggagcagaatcaatggaggagtgctagagaagcggttgaagatccaaaattctgggaaatggtggatgaagagcgtgaggcgcacttacgcggagaatgtcatacttgcatttacaacatgatgggaaagagggagaaaaaacccggagagtttgggaaagccaagggaagcagggccatctggtttatgtggctgggagctcgcttcctagagtttgaggctctgggctttcttaatgaggaccactggcttggaagaaagaactcggggggcggggtcgagggtctgggcctccagaaattaggctacatcctgcgtgaagttggcacccgacccggaggcagaatctacgctgatgacacagccggttgggacacccgcatcacaagagctgacctggagaatgaagccaaggttcttgagttgttggacggggagcaccggcgcctggccagggccatcattgagctcacctatcgccacaaagtagtgaaggtaatgcgcccggctgctgatggaagaaccgtcatggacgtcatctccagggaagaccagagaggaagtgggcaagttgtcacctacgctctaaacacctttaccaacctggctgtccagttggtgagaatgatggaaggagagggtgtgatcggcccagatgatgtggagaaactcacaaaggggaaagggcccaaggttagaacctggctgtctgagaatggggaggaaagactcagccgcatggctgtcagtggagatgactgtgtggtaaagcccttggatgatcgctttgccacctctctccactttctcaacgccatgtcaaaggtgcgcaaggacatccaagagtggaaaccatcaaccggatggtatgattggcagcaagttccattctgttcaaaccacttcactgaactgatcatgaaagatggaagaacactggtgactccatgccgagggcaggatgagttagtgggcagagctcgcatctccccaggggctggatggaatgttcgagacactgcttgcttagccaaatcttatgctcagatgtggttgctcctgtacttccacagaagagatctgcggttgatggccaacgccatctgctctgccgtacctgtaaactgggtccctactggaagaaccacatggtccatccacgctggaggagagtggatgacaacggaagacatgctggaggtctggaatcgtgtctggattgaggaaaatgaatggatggaggacaaaaccccagtggagaagtggagtgatgttccatactctggcaaacgagaggacatttggtgtggcagcctgattggcacaagagcccgggccacgtgggcagaaaacattcaagtggccatcaaccaagtcagatcaataattggagatgagaaatatgtggattacatgagttcattgaagagatatgaagacacaacattggttgaggatacagtattgtaa

SEQ ID NO: 35 - DNA, 11022 bp, synthetic construct
  source 1..11022: mol_type = other DNA
agtagttcgcctgtgtgagctgacaaacttagtagtgtttgtgaggattttgaacaattaacacagtgcgagctgtttcttagcacgaagatctcgatgtctaagaaaccaggagggcccggcaaaagccgggctgtcaatatgctaaaacgcggaatgccccgcgtgttgagtctgaccggactgaagcgggccatgctgagcctgatcgacggccgcggccctacacggttcgtgctggccctgctggcctttttccggttcacagcaattgccccaacacgggccgtgctggatcgctggcggagcgtgaacaagcagaccgccatgaagcacctgctgtcttttaagaaggagctgggcacactgacaagcgccatcaatcggagaagcagcaagcagaagaagcggggcggcaagacaggcatcgccttcatgatcggcctgatcgccggcgtgggcgccgtgacactgtctaactttcagggcaaggtaatgatgaccgtgaatgccacagacgtgaccgacatcatcacaatccccacagccgccggcaagaatctgtgcatcgtgagagccatggatgtgggccacatgtgcgatgataccatcacctacgagtgtccagtgctgtctgccggcaatgatcctgaggacatcgactgttggtgtaccaagctggccgtgtacgtgaggtacggccgctgcaccaagacacggcacagcaggcgcagccgcagaagcctgaccgtgcagacacacggcgagagcaccctgagcaataagaagggcgcctggatggacagcacaaaggccacccgctacctggtgaagacagagtcctggatactgagaaatcccggctatgccctggtggccgccgtgatcggctggatgctgggcagcaataccatgcagcgcgtggtgtttgccgtgctgctgctgctggtggcccccgcctatagcttcaactgcctgggcatgtctaaccgcgattttctggagggcgtgtccggcgccacatgggtggacctggtgctggagggcgactcttgtgtgaccatcatgagcaaggataagcccaccatcgacgtgaagatgatgaacatggaggccgccaacctggccgaggtgcgctcctattgttacctggccacagtgtctgagctgtctacaaaggccgcctgtcccacaatgggcgaggcccacaacgacaagagggccgacccctcctttgtatgcaagcagggcgtggtggaccggggctggggcaatggctgtggcctgttcggcaagggcagcatcgatacatgcgccaagtttgcctgttctaccaaggccacaggccgcaccatcctgaaggagaatatcaagtacgaggtggccatctttgtgcacggccccaccaccgtggagagccacggcaattacttcacccagacaggcgccgcccaggccggcaggttctctatcacacccgccgccccctcttacacccttaagctgggcgagtatggcgaggtgaccgtggattgcgagccacgcagcggcatcgatacaagcgcctattacgtgatgacagtgggcaccaagacctttctggtgcaccgcgagtggttcatggatctgaatctgccctggtccagcgccgagagcaatgtatggcgcaatcgggagacactgatggagtttgaggagcctcacgccacaaagcagagcgtgatcgccctgggcagccaggagggcgccctgcaccaggccctggccggcgccatccccgtggagttttctagcaacaccgtgaagctgacaagcggccacctgaagtgcagagtgaagatggagaagctgcagctgaagggcacaacctacggcgtgtgcagcaaggccttccggttcctgggcacccctgccgataccggccacggcaccgtggtgctggagctgcagtataccggcaccgatggcccctgcaagatccccatctcttccgtggccagcctgaatgatctgacacccgtgggccgcctggtgacagtgaatcctttcgtgtccgtgtctaccgccaacgccaaggtgctgatcgagctggagcccccctttggcgatagctatatcgtggtgggccgcggcgagcagcagatcaaccaccactggcacaagagcggctcttctatcggcaaggccttcacagccaccctgaagggcgcccagagactggccgccctgggcgatacagcctgggacttcggctctgtgggcggcgtgtttaccagcgtgggcaaggccgtgcaccaggtgtttggcggcgcctttaggtccctgtttggcggcatgagctggatcacccagggcctgctgggcgccctgctgctgtggatgggcatcaacgcccgcgatagatccatcgccctgaccttcctggccgtgggcggcgtgctgctgttcctgtccgtgaacgtgcacgccgacaccggctgcgccatcgacatctctaggcaggagctgagatgtggcagcggcgtgtttatccacaacgatgtggaggcctggatggaccgatataagtattatcccgagacaccccagggcctggccaagatcatccagaaggcccacaaggagggcgtgtgcggcctgcgctccgtgagcagactggagcaccagatgtgggaggccgtgaaggacgagctgaacaccctgctgaaggagaatggcgtggatctgagcatcgtggtggagaagcaggagggcatgtataagagcgccccccggcggctgaccgccacaaccgagaagctggagatcggctggaaggcctggggcaagagcatcctgtttgcccccgagctggccaacaatacctttgtgatcgatggccccgagaccaaggagtgccccacccagaaccgcgcctggaactctctggaggtggaggactttggcttcggcctgaccagcacccgcatgtttctgcgcgtgagagagagcaatacaacagagtgtgatagcaagatcatcggcacagccgtgaagaacaatctggccatccacagcgacctgagctattggatcgagagccgctttaacgacacatggaagctggagcgcgccgtgctgggcgaggtgaagagctgtacctggcccgagacccacacactgtggggcgatggcgtgctggagtctgacctgatcatcccaatcacactggccggccctcgcagcaaccacaaccgccgcccaggctataagacccagtcccagggcccctgggacgagggccgggtggagatcgacttcgattactgccccggcacaaccgtgacactgagcgagtcttgtggccaccgcggccctgccacccggacaaccacagagtctggcaagctgatcaccgattggtgttgtcggtcctgcaccctgcctcctctgcggtatcagaccgacaatggctgttggtacggcatggagatcagaccccagcggcacgacgagaagacactggtgcagtcccaggtgaacgcctacaacgccgatatgatcgatccattccagctgggcctgctggtggtgttcctggccacccaggaggtgctgcgcaagcggtggacagccaagatcagcatgcctgccatcctgatcgccctgctggtgctggtgttcggcggcatcacctacaccgacgtgctgagatacgtgatcctggtgggcgccgccttcgccgagtccaacagcggcggcgatgtggtgcacctggccctgatggccacattcaagatccagcccgtgtttatggtggcctctttcctgaaggcccgctggaccaatcaggagaatatcctgctgatgctggccgccgcctttttccagatggcctattacgatgcccggcagatcctgctgtgggagatgcccgatgtgctgaactccctggccgtggcctggatgatcctgcgggccatcaccttcacaacaacatccaatgtggtggtgcctctgctggccctgctgacacccggcctgagatgtctgaatctggacgtgtataggatcctgctgctgatggtgggcatcggcagcctgatccgcgagaagcgcagcgccgccgccaagaagaagggcgccagcctgctgtgcctggccctggccagcaccggctttttcaaccccatgatcctggccgccggcctggtggcctgtgatcccaatcggaagcggggctggccagccacagaggtaatgacagccgtgggcctgatgttcgccatcgtgggcggcctggccgagctggacatcgatagcatggccatccctatgaccatcgccggcctgatgtttgccgcctttgtgatcagcggcaagagcaccgacatgtggatcgagcggaccgccgacatcagctgggagggcgatgccgagatcacaggctctagcgagcgggtggatgtgcggctggacgatgacggcaacttccagctgatgaacgatccaggcgccccctggaagatatggatgctgcggatggcctgcctggccatcagcgcctacaccccctgggccatcctgccctccgtggtgggcttttggatcaccctgcagtacaccaagcggggcggcgtgctgtgggatacaccttctcccaaggagtataagcgcggcgataccaccaccggcgtgtatcgcatcatgacacgcggcctgctgggcagctaccaggccggcgccggcgtgatggtggagggcgtgttccacaccctgtggcacaccaccaagggcgccgccctgatgtccggcgagggcaggctggacccctattggggctccgtgaaggaggaccggctgtgctatggcggcccctggaagctgcagcacaagtggaacggccaggatgaggtgcagatgatcgtggtggagcccggcaagaatgtgaagaacgtgcagacaaagcccggcgtgtttaagacacctgagggcgagatcggcgccgtgacactggacttccccaccggcacctccggctctcccatcgtggacaagaatggcgatgtgatcggcctgtatggcaatggcgtgatcatgcctaatggcagctacatctctgccatcgtgcagggcgagcggatggatgagccagtgcctgccggcttcgagcccgagatgctgcgcaagaagcagatcaccgtgctggacctgcacccaggcgccggcaagacccggcggatactgcctcagatcatcaaggaggccatcaatcggaggctgagaaccgccgtgctggcccctacaagggtggtggccgccgagatggccgaggccctgcggggcctgcccatccgctaccagaccagcgccgtggccagagagcacaacggcaatgagatcgtggatgtgatgtgccacgccaccctgacccacagactgatgagccctcacagagtgccaaactataatctgttcgtgatggatgaggcccacttcacagatccagccagcatcgccgcccgcggctacatctctaccagagtggagctgggcgaggccgccgccatctttatgaccgccaccccacctggcacatccgatccatttcccgagtccaatgcccctatctctgacctgcagacagagatccccgacagagcctggaatagcggctacgagtggatcaccgagtatatcggcaagaccgtgtggtttgtgccctctgtgaagatgggcaatgagatcgccctgtgcctgcagagagccggcaagaaggtaatccagctgaatcggaagtcgtacgagacagagtatccaaaatgcaagaacgatgattgggactttgtcgtcacaacagatatatctgagatgggagcaaactttaaggcaagcagggtgattgacagccggaagagtgtgaaaccgactatcatcacggaaggagagggaagagtgatcttgggggaaccatccgctgtgacggcagccagtgcagcccagagacgaggacgcattggtaggaatccatcacaagttggagatgagtactgctatggagggcacacgaatgaggatgactcgaactgtgctcactggactgaggcacgaatcatgctcgataacatcaacatgccaaacggattgattgctcaattctaccaaccagagcgcgagaaggtatacaccatggacggggaataccgacttagaggagaggagaggaaaaacttcctggaattgttgagaactgcagacttgccagtatggctagcttataaggtggcagcagctggggtgtcatatcatgaccggaggtggtgttttgatggccctaggacaaatacaatccttgaagacaacaatgaagtggaagtcatcacaaagcttggtgaaaggaagattctgaggccacgctggattgatgcaagggtgtactcagaccatcaggcgctgaaatcattcaaggacttcgcctcagggaagcgctctcaaataggttttatcgaggtccttggaaagatgcctgaacatttcatggggaagacatgggaagcactcgacaccatgtatgttgtagccactgcagagaaaggaggaagagctcacagaatggctttggaggagctaccagacgccctccaaacaatagctctgatcgctctgttgagtgtgatgaccatgggagtgttttttcttctcatgcagaggaagggcatcggaaagataggcctgggaggcgttgtcctgggagccgcaacctttttctgttggatggctgaagtaccaggaacgaagattgccggaatgctgctgctttccctccttctgatgatcgtgttgattcctgagccagagaagcaacgctcgcagacagacaaccagctagctgtgttcctgatttgcgtgttgacccttgtgggtgcggtggcagccaatgagatgggttggctggacaagaccaagagtgacataagcggtctgtttgggcaaagaattgaaaccaaggagaattttagcattggggagttccttttggacctgaggccggcaacggcttggtcactgtatgctgtgactacagcagttctcactcccttgctaaagcacttgatcacgtcagactacatcaacacctcattgacctcaataaatgttcaagctagtgcgctattcacgctcgcgcgaggcttcccttttgtcgatgttggagtatcggctctcctgctagcagccggatgctggggacaagtcactctcaccgtgacggtgacatcagcaacacttctgttctgccattatgcctacatggtacctggatggcaggctgaggcaatgcgctcagcccagcgacgaacagccgctggaatcatgaaaaacgctgtggtagacggcatcgtggccacggacgttccagagctagagcgtaccacacccatcatgcagaagaaggttggacaagttatgctgattttggtgtctcttgccgcattggtggtaaacccgtctgtgaagacagtgcgggaagccggaattctgattacggcagcagctgttaccctctgggagaacggagcaagctctgtgtggaacgcaacaaccgccataggactttgtcacatcatgcgcggaggctggttatcgtgtttatccataacatggactcttgtaaaaaacatggaaaaaccagggctgaagagaggtggggcaaaaggacgcaccttgggggaggtttggaaagaaagacttaaccagatgacgaaagaagaattcatcaggtaccgtaaagaagccatcactgaagttgaccgctcagcagcaaaacacgctaggaaggaaaggaatatcactggagggcatccagtttctagaggcacggcaaagctaagatggctggtcgagaggaggtttcttgagccggtcggaaaagtgatcgaccttggatgtggaagaggcggctggtgttattacatggccacacaaaaaagagtccaagaagtcagagggtacacaaaaggtggtcccggacatgaagagccccaactagtgcagagctatggatggaacattgtcaccatgaagagtggggtggatgtgttctataggccttctgaatgttgtgacactctcctttgtgatatcggagagtcctcatcaagtgctgaagttgaagaacatagaacgctacgagtccttgaaatggtggaagactggttgcatcgagggccaaaggaattttgtgtgaaggtactgtgcccctacatgccaaaggtcatagaaaagatggagctgctccaacgccggtatggcgggggattggttaggaacccactctcacggaattccacacatgaaatgtattgggtgagtcgagcctcaggcaatgtggtgcactcagtgaacatgaccagccaggtactcttaggaaggatggagaagaagacctggaagggacctcagtacgaagaagacgtgaacttgggaagcggaacgagagcagtgggaaaacctctactcaactcagacaccagcaagataaagaacaggattgaacgacttaggcgtgagtacagctcgacatggcatcatgatgagaaccacccatatagaacctggaactaccacggtagctacgaagtgaagccaacaggctctgcaagctcactggtcaatggagtggtcaggctcctctcgaaaccatgggacaccatcacaaatgtcaccacaatggccatgacggacaccaccccttttggacaacagcgagtgttcaaagagaaggtggacacgaaagctccggaaccgccagaaggagtgaagtatgtgctcaatgaaaccaccaactggttgtgggcgttcctggcacgagaaaagcgtcccagaatgtgctcgcgagaggaatttataaggaaggtcaatagtaatgcagctctgggcgccatgtttgaggagcagaatcaatggaggagtgctagagaagcggttgaagatccaaaattctgggaaatggtggatgaagagcgtgaggcgcacttacgcggagaatgtcatacttgcatttacaacatgatgggaaagagggagaaaaaacccggagagtttgggaaagccaagggaagcagggccatctggtttatgtggctgggagctcgcttcctagagtttgaggctctgggctttcttaatgaggaccactggcttggaagaaagaactcggggggcggggtcgagggtctgggcctccagaaattaggctacatcctgcgtgaagttggcacccgacccggaggcagaatctacgctgatgacacagccggttgggacacccgcatcacaagagctgacctggagaatgaagccaaggttcttgagttgttggacggggagcaccggcgcctggccagggccatcattgagctcacctatcgccacaaagtagtgaaggtaatgcgcccggctgctgatggaagaaccgtcatggacgtcatctccagggaagaccagagaggaagtgggcaagttgtcacctacgctctaaacacctttaccaacctggctgtccagttggtgagaatgatggaaggagagggtgtgatcggcccagatgatgtggagaaactcacaaaggggaaagggcccaaggttagaacctggctgtctgagaatggggaggaaagactcagccgcatggctgtcagtggagatgactgtgtggtaaagcccttggatgatcgctttgccacctctctccactttctcaacgccatgtcaaaggtgcgcaaggacatccaagagtggaaaccatcaaccggatggtatgattggcagcaagttccattctgttcaaaccacttcactgaactgatcatgaaagatggaagaacactggtgactccatgccgagggcaggatgagttagtgggcagagctcgcatctccccaggggctggatggaatgttcgagacactgcttgcttagccaaatcttatgctcagatgtggttgctcctgtacttccacagaagagatctgcggttgatggccaacgccatctgctctgccgtacctgtaaactgggtccctactggaagaaccacatggtccatccacgctggaggagagtggatgacaacggaagacatgctggaggtctggaatcgtgtctggattgaggaaaatgaatggatggaggacaaaaccccagtggagaagtggagtgatgttccatactctggcaaacgagaggacatttggtgtggcagcctgattggcacaagagcccgggccacgtgggcagaaaacattcaagtggccatcaaccaagtcagatcaataattggagatgagaaatatgtggattacatgagttcattgaagagatatgaagacacaacattggttgaggatacagtattgtaaatactttgttaattgtaaataaatattgttattatgtgtagaagtttagctttataatagtgtttagtgtgtttagagttagaaaaattttagtgaggaagtcaggccggaaaattcccgccaccggaagttgagtagacggtgctgcctgcgactcaaccccaggaggactgggtgaacaaagctgcgaagtgatccatgtaagccctcagaaccgtctcggaaagaggaccccacatgttgtagcttcaaggcccaatgtcagaccacgccatggcgtgccactctgcggagagtgcagtctgcgacagtgccccaggaggactgggtgaacaaaggcgaatcaacgtcccacgcggccctagctctggcaatggtgttaaccagagtgaaaggactagaggttagaggagaccccgcgttctgaagtgcacggcccagcctggctgaagctgtaggtcaggggaaggactagaggttagtggagaccccgtgccgcaaaacaccacaacaacacagcatattgacacctgggatagactaggagatcttctgctctgcacaaccagccacacggcacagtgcgccgacaatggtggctggtggtgcgagaacacaggatct

SEQ ID NO: 36 - DNA, 10302 bp, synthetic construct
  source 1..10302: mol_type = other DNA
atgtctaagaaaccaggagggcccggcaaaagccgggctgtcaatatgctaaaacgcggaatgccccgcgtgttgagtctgaccggactgaagcgggccatgctgagcctgatcgacggccgcggccctacacggttcgtgctggccctgctggcctttttccggttcacagcaattgccccaacacgggccgtgctggatcgctggcggagcgtgaacaagcagaccgccatgaagcacctgctgtcttttaagaaggagctgggcacactgacaagcgccatcaatcggagaagcagcaagcagaagaagcggggcggcaagacaggcatcgccttcatgatcggcctgatcgccggcgtgggcgccgtgacactgtctaactttcagggcaaggtaatgatgaccgtgaatgccacagacgtgaccgacatcatcacaatccccacagccgccggcaagaatctgtgcatcgtgagagccatggatgtgggccacatgtgcgatgataccatcacctacgagtgtccagtgctgtctgccggcaatgatcctgaggacatcgactgttggtgtaccaagctggccgtgtacgtgaggtacggccgctgcaccaagacacggcacagcaggcgcagccgcagaagcctgaccgtgcagacacacggcgagagcaccctgagcaataagaagggcgcctggatggacagcacaaaggccacccgctacctggtgaagacagagtcctggatactgagaaatcccggctatgccctggtggccgccgtgatcggctggatgctgggcagcaataccatgcagcgcgtggtgtttgccgtgctgctgctgctggtggcccccgcctatagcttcaactgcctgggcatgtctaaccgcgattttctggagggcgtgtccggcgccacatgggtggacctggtgctggagggcgactcttgtgtgaccatcatgagcaaggataagcccaccatcgacgtgaagatgatgaacatggaggccgccaacctggccgaggtgcgctcctattgttacctggccacagtgtctgagctgtctacaaaggccgcctgtcccacaatgggcgaggcccacaacgacaagagggccgacccctcctttgtatgcaagcagggcgtggtggaccggggctggggcaatggctgtggcctgttcggcaagggcagcatcgatacatgcgccaagtttgcctgttctaccaaggccacaggccgcaccatcctgaaggagaatatcaagtacgaggtggccatctttgtgcacggccccaccaccgtggagagccacggcaattacttcacccagacaggcgccgcccaggccggcaggttctctatcacacccgccgccccctcttacacccttaagctgggcgagtatggcgaggtgaccgtggattgcgagccacgcagcggcatcgatacaagcgcctattacgtgatgacagtgggcaccaagacctttctggtgcaccgcgagtggttcatggatctgaatctgccctggtccagcgccgagagcaatgtatggcgcaatcgggagacactgatggagtttgaggagcctcacgccacaaagcagagcgtgatcgccctgggcagccaggagggcgccctgcaccaggccctggccggcgccatccccgtggagttttctagcaacaccgtgaagctgacaagcggccacctgaagtgcagagtgaagatggagaagctgcagctgaagggcacaacctacggcgtgtgcagcaaggccttccggttcctgggcacccctgccgataccggccacggcaccgtggtgctggagctgcagtataccggcaccgatggcccctgcaagatccccatctcttccgtggccagcctgaatgatctgacacccgtgggccgcctggtgacagtgaatcctttcgtgtccgtgtctaccgccaacgccaaggtgctgatcgagctggagcccccctttggcgatagctatatcgtggtgggccgcggcgagcagcagatcaaccaccactggcacaagagcggctcttctatcggcaaggccttcacagccaccctgaagggcgcccagagactggccgccctgggcgatacagcctgggacttcggctctgtgggcggcgtgtttaccagcgtgggcaaggccgtgcaccaggtgtttggcggcgcctttaggtccctgtttggcggcatgagctggatcacccagggcctgctgggcgccctgctgctgtggatgggcatcaacgcccgcgatagatccatcgccctgaccttcctggccgtgggcggcgtgctgctgttcctgtccgtgaacgtgcacgccgacaccggctgcgccatcgacatctctaggcaggagctgagatgtggcagcggcgtgtttatccacaacgatgtggaggcctggatggaccgatataagtattatcccgagacaccccagggcctggccaagatcatccagaaggcccacaaggagggcgtgtgcggcctgcgctccgtgagcagactggagcaccagatgtgggaggccgtgaaggacgagctgaacaccctgctgaaggagaatggcgtggatctgagcatcgtggtggagaagcaggagggcatgtataagagcgccccccggcggctgaccgccacaaccgagaagctggagatcggctggaaggcctggggcaagagcatcctgtttgcccccgagctggccaacaatacctttgtgatcgatggccccgagaccaaggagtgccccacccagaaccgcgcctggaactctctggaggtggaggactttggcttcggcctgaccagcacccgcatgtttctgcgcgtgagagagagcaatacaacagagtgtgatagcaagatcatcggcacagccgtgaagaacaatctggccatccacagcgacctgagctattggatcgagagccgctttaacgacacatggaagctggagcgcgccgtgctgggcgaggtgaagagctgtacctggcccgagacccacacactgtggggcgatggcgtgctggagtctgacctgatcatcccaatcacactggccggccctcgcagcaaccacaaccgccgcccaggctataagacccagtcccagggcccctgggacgagggccgggtggagatcgacttcgattactgccccggcacaaccgtgacactgagcgagtcttgtggccaccgcggccctgccacccggacaaccacagagtctggcaagctgatcaccgattggtgttgtcggtcctgcaccctgcctcctctgcggtatcagaccgacaatggctgttggtacggcatggagatcagaccccagcggcacgacgagaagacactggtgcagtcccaggtgaacgcctacaacgccgatatgatcgatccattccagctgggcctgctggtggtgttcctggccacccaggaggtgctgcgcaagcggtggacagccaagatcagcatgcctgccatcctgatcgccctgctggtgctggtgttcggcggcatcacctacaccgacgtgctgagatacgtgatcctggtgggcgccgccttcgccgagtccaacagcggcggcgatgtggtgcacctggccctgatggccacattcaagatccagcccgtgtttatggtggcctctttcctgaaggcccgctggaccaatcaggagaatatcctgctgatgctggccgccgcctttttccagatggcctattacgatgcccggcagatcctgctgtgggagatgcccgatgtgctgaactccctggccgtggcctggatgatcctgcgggccatcaccttcacaacaacatccaatgtggtggtgcctctgctggccctgctgacacccggcctgagatgtctgaatctggacgtgtataggatcctgctgctgatggtgggcatcggcagcctgatccgcgagaagcgcagcgccgccgccaagaagaagggcgccagcctgctgtgcctggccctggccagcaccggctttttcaaccccatgatcctggccgccggcctggtggcctgtgatcccaatcggaagcggggctggccagccacagaggtaatgacagccgtgggcctgatgttcgccatcgtgggcggcctggccgagctggacatcgatagcatggccatccctatgaccatcgccggcctgatgtttgccgcctttgtgatcagcggcaagagcaccgacatgtggatcgagcggaccgccgacatcagctgggagggcgatgccgagatcacaggctctagcgagcgggtggatgtgcggctggacgatgacggcaacttccagctgatgaacgatccaggcgccccctggaagatatggatgctgcggatggcctgcctggccatcagcgcctacaccccctgggccatcctgccctccgtggtgggcttttggatcaccctgcagtacaccaagcggggcggcgtgctgtgggatacaccttctcccaaggagtataagcgcggcgataccaccaccggcgtgtatcgcatcatgacacgcggcctgctgggcagctaccaggccggcgccggcgtgatggtggagggcgtgttccacaccctgtggcacaccaccaagggcgccgccctgatgtccggcgagggcaggctggacccctattggggctccgtgaaggaggaccggctgtgctatggcggcccctggaagctgcagcacaagtggaacggccaggatgaggtgcagatgatcgtggtggagcccggcaagaatgtgaagaacgtgcagacaaagcccggcgtgtttaagacacctgagggcgagatcggcgccgtgacactggacttccccaccggcacctccggctctcccatcgtggacaagaatggcgatgtgatcggcctgtatggcaatggcgtgatcatgcctaatggcagctacatctctgccatcgtgcagggcgagcggatggatgagccagtgcctgccggcttcgagcccgagatgctgcgcaagaagcagatcaccgtgctggacctgcacccaggcgccggcaagacccggcggatactgcctcagatcatcaaggaggccatcaatcggaggctgagaaccgccgtgctggcccctacaagggtggtggccgccgagatggccgaggccctgcggggcctgcccatccgctaccagaccagcgccgtggccagagagcacaacggcaatgagatcgtggatgtgatgtgccacgccaccctgacccacagactgatgagccctcacagagtgccaaactataatctgttcgtgatggatgaggcccacttcacagatccagccagcatcgccgcccgcggctacatctctaccagagtggagctgggcgaggccgccgccatctttatgaccgccaccccacctggcacatccgatccatttcccgagtccaatgcccctatctctgacctgcagacagagatccccgacagagcctggaatagcggctacgagtggatcaccgagtatatcggcaagaccgtgtggtttgtgccctctgtgaagatgggcaatgagatcgccctgtgcctgcagagagccggcaagaaggtaatccagctgaatcggaagtcgtacgagacagagtatccaaaatgcaagaacgatgattgggactttgtcgtcacaacagatatatctgagatgggagcaaactttaaggcaagcagggtgattgacagccggaagagtgtgaaaccgactatcatcacggaaggagagggaagagtgatcttgggggaaccatccgctgtgacggcagccagtgcagcccagagacgaggacgcattggtaggaatccatcacaagttggagatgagtactgctatggagggcacacgaatgaggatgactcgaactgtgctcactggactgaggcacgaatcatgctcgataacatcaacatgccaaacggattgattgctcaattctaccaaccagagcgcgagaaggtatacaccatggacggggaataccgacttagaggagaggagaggaaaaacttcctggaattgttgagaactgcagacttgccagtatggctagcttataaggtggcagcagctggggtgtcatatcatgaccggaggtggtgttttgatggccctaggacaaatacaatccttgaagacaacaatgaagtggaagtcatcacaaagcttggtgaaaggaagattctgaggccacgctggattgatgcaagggtgtactcagaccatcaggcgctgaaatcattcaaggacttcgcctcagggaagcgctctcaaataggttttatcgaggtccttggaaagatgcctgaacatttcatggggaagacatgggaagcactcgacaccatgtatgttgtagccactgcagagaaaggaggaagagctcacagaatggctttggaggagctaccagacgccctccaaacaatagctctgatcgctctgttgagtgtgatgaccatgggagtgttttttcttctcatgcagaggaagggcatcggaaagataggcctgggaggcgttgtcctgggagccgcaacctttttctgttggatggctgaagtaccaggaacgaagattgccggaatgctgctgctttccctccttctgatgatcgtgttgattcctgagccagagaagcaacgctcgcagacagacaaccagctagctgtgttcctgatttgcgtgttgacccttgtgggtgcggtggcagccaatgagatgggttggctggacaagaccaagagtgacataagcggtctgtttgggcaaagaattgaaaccaaggagaattttagcattggggagttccttttggacctgaggccggcaacggcttggtcactgtatgctgtgactacagcagttctcactcccttgctaaagcacttgatcacgtcagactacatcaacacctcattgacctcaataaatgttcaagctagtgcgctattcacgctcgcgcgaggcttcccttttgtcgatgttggagtatcggctctcctgctagcagccggatgctggggacaagtcactctcaccgtgacggtgacatcagcaacacttctgttctgccattatgcctacatggtacctggatggcaggctgaggcaatgcgctcagcccagcgacgaacagccgctggaatcatgaaaaacgctgtggtagacggcatcgtggccacggacgttccagagctagagcgtaccacacccatcatgcagaagaaggttggacaagttatgctgattttggtgtctcttgccgcattggtggtaaacccgtctgtgaagacagtgcgggaagccggaattctgattacggcagcagctgttaccctctgggagaacggagcaagctctgtgtggaacgcaacaaccgccataggactttgtcacatcatgcgcggaggctggttatcgtgtttatccataacatggactcttgtaaaaaacatggaaaaaccagggctgaagagaggtggggcaaaaggacgcaccttgggggaggtttggaaagaaagacttaaccagatgacgaaagaagaattcatcaggtaccgtaaagaagccatcactgaagttgaccgctcagcagcaaaacacgctaggaaggaaaggaatatcactggagggcatccagtttctagaggcacggcaaagctaagatggctggtcgagaggaggtttcttgagccggtcggaaaagtgatcgaccttggatgtggaagaggcggctggtgttattacatggccacacaaaaaagagtccaagaagtcagagggtacacaaaaggtggtcccggacatgaagagccccaactagtgcagagctatggatggaacattgtcaccatgaagagtggggtggatgtgttctataggccttctgaatgttgtgacactctcctttgtgatatcggagagtcctcatcaagtgctgaagttgaagaacatagaacgctacgagtccttgaaatggtggaagactggttgcatcgagggccaaaggaattttgtgtgaaggtactgtgcccctacatgccaaaggtcatagaaaagatggagctgctccaacgccggtatggcgggggattggttaggaacccactctcacggaattccacacatgaaatgtattgggtgagtcgagcctcaggcaatgtggtgcactcagtgaacatgaccagccaggtactcttaggaaggatggagaagaagacctggaagggacctcagtacgaagaagacgtgaacttgggaagcggaacgagagcagtgggaaaacctctactcaactcagacaccagcaagataaagaacaggattgaacgacttaggcgtgagtacagctcgacatggcatcatgatgagaaccacccatatagaacctggaactaccacggtagctacgaagtgaagccaacaggctctgcaagctcactggtcaatggagtggtcaggctcctctcgaaaccatgggacaccatcacaaatgtcaccacaatggccatgacggacaccaccccttttggacaacagcgagtgttcaaagagaaggtggacacgaaagctccggaaccgccagaaggagtgaagtatgtgctcaatgaaaccaccaactggttgtgggcgttcctggcacgagaaaagcgtcccagaatgtgctcgcgagaggaatttataaggaaggtcaatagtaatgcagctctgggcgccatgtttgaggagcagaatcaatggaggagtgctagagaagcggttgaagatccaaaattctgggaaatggtggatgaagagcgtgaggcgcacttacgcggagaatgtcatacttgcatttacaacatgatgggaaagagggagaaaaaacccggagagtttgggaaagccaagggaagcagggccatctggtttatgtggctgggagctcgcttcctagagtttgaggctctgggctttcttaatgaggaccactggcttggaagaaagaactcggggggcggggtcgagggtctgggcctccagaaattaggctacatcctgcgtgaagttggcacccgacccggaggcagaatctacgctgatgacacagccggttgggacacccgcatcacaagagctgacctggagaatgaagccaaggttcttgagttgttggacggggagcaccggcgcctggccagggccatcattgagctcacctatcgccacaaagtagtgaaggtaatgcgcccggctgctgatggaagaaccgtcatggacgtcatctccagggaagaccagagaggaagtgggcaagttgtcacctacgctctaaacacctttaccaacctggctgtccagttggtgagaatgatggaaggagagggtgtgatcggcccagatgatgtggagaaactcacaaaggggaaagggcccaaggttagaacctggctgtctgagaatggggaggaaagactcagccgcatggctgtcagtggagatgactgtgtggtaaagcccttggatgatcgctttgccacctctctccactttctcaacgccatgtcaaaggtgcgcaaggacatccaagagtggaaaccatcaaccggatggtatgattggcagcaagttccattctgttcaaaccacttcactgaactgatcatgaaagatggaagaacactggtgactccatgccgagggcaggatgagttagtgggcagagctcgcatctccccaggggctggatggaatgttcgagacactgcttgcttagccaaatcttatgctcagatgtggttgctcctgtacttccacagaagagatctgcggttgatggccaacgccatctgctctgccgtacctgtaaactgggtccctactggaagaaccacatggtccatccacgctggaggagagtggatgacaacggaagacatgctggaggtctggaatcgtgtctggattgaggaaaatgaatggatggaggacaaaaccccagtggagaagtggagtgatgttccatactctggcaaacgagaggacatttggtgtggcagcctgattggcacaagagcccgggccacgtgggcagaaaacattcaagtggccatcaaccaagtcagatcaataattggagatgagaaatatgtggattacatgagttcattgaagagatatgaagacacaacattggttgaggatacagtattgtaa

SEQ ID NO: 37 - DNA, 11022 bp, synthetic construct
  source 1..11022: mol_type = other DNA
agtagttcgcctgtgtgagctgacaaacttagtagtgtttgtgaggattttgaacaattaacacagtgcgagctgtttcttagcacgaagatctcgatgtctaagaaaccaggagggcccggcaaaagccgggctgtcaatatgctaaaacgcggaatgccccgcgtgttgagtctgaccggactgaagcgggccatgctgagcctgatcgacggccgcggccctacacggttcgtgctggccctgctggcctttttccggttcacagcaattgccccaacacgggccgtgctggatcgctggcggagcgtgaacaagcagaccgccatgaagcacctgctgtcttttaagaaggagctgggcacactgacaagcgccatcaatcggagaagcagcaagcagaagaagcggggcggcaagacaggcatcgccttcatgatcggcctgatcgccggcgtgggcgccgtgacactgtctaactttcagggcaaggtaatgatgaccgtgaatgccacagacgtgaccgacatcatcacaatccccacagccgccggcaagaatctgtgcatcgtgagagccatggatgtgggccacatgtgcgatgataccatcacctacgagtgtccagtgctgtctgccggcaatgatcctgaggacatcgactgttggtgtaccaagctggccgtgtacgtgaggtacggccgctgcaccaagacacggcacagcaggcgcagccgcagaagcctgaccgtgcagacacacggcgagagcaccctgagcaataagaagggcgcctggatggacagcacaaaggccacccgctacctggtgaagacagagtcctggatactgagaaatcccggctatgccctggtggccgccgtgatcggctggatgctgggcagcaataccatgcagcgcgtggtgtttgccgtgctgctgctgctggtggcccccgcctatagcttcaactgcctgggcatgtctaaccgcgattttctggagggcgtgtccggcgccacatgggtggacctggtgctggagggcgactcttgtgtgaccatcatgagcaaggataagcccaccatcgacgtgaagatgatgaacatggaggccgccaacctggccgaggtgcgctcctattgttacctggccacagtgtctgagctgtctacaaaggccgcctgtcccacaatgggcgaggcccacaacgacaagagggccgacccctcctttgtatgcaagcagggcgtggtggaccggggctggggcaatggctgtggcctgttcggcaagggcagcatcgatacatgcgccaagtttgcctgttctaccaaggccacaggccgcaccatcctgaaggagaatatcaagtacgaggtggccatctttgtgcacggccccaccaccgtggagagccacggcaattacttcacccagacaggcgccgcccaggccggcaggttctctatcacacccgccgccccctcttacacccttaagctgggcgagtatggcgaggtgaccgtggattgcgagccacgcagcggcatcgatacaagcgcctattacgtgatgacagtgggcaccaagacctttctggtgcaccgcgagtggttcatggatctgaatctgccctggtccagcgccgagagcaatgtatggcgcaatcgggagacactgatggagtttgaggagcctcacgccacaaagcagagcgtgatcgccctgggcagccaggagggcgccctgcaccaggccctggccggcgccatccccgtggagttttctagcaacaccgtgaagctgacaagcggccacctgaagtgcagagtgaagatggagaagctgcagctgaagggcacaacctacggcgtgtgcagcaaggccttccggttcctgggcacccctgccgataccggccacggcaccgtggtgctggagctgcagtataccggcaccgatggcccctgcaagatccccatctcttccgtggccagcctgaatgatctgacacccgtgggccgcctggtgacagtgaatcctttcgtgtccgtgtctaccgccaacgccaaggtgctgatcgagctggagcccccctttggcgatagctatatcgtggtgggccgcggcgagcagcagatcaaccaccactggcacaagagcggctcttctatcggcaaggccttcacagccaccctgaagggcgcccagagactggccgccctgggcgatacagcctgggacttcggctctgtgggcggcgtgtttaccagcgtgggcaaggccgtgcaccaggtgtttggcggcgcctttaggtccctgtttggcggcatgagctggatcacccagggcctgctgggcgccctgctgctgtggatgggcatcaacgcccgcgatagatccatcgccctgaccttcctggccgtgggcggcgtgctgctgttcctgtccgtgaacgtgcacgccgacaccggctgcgccatcgacatctctaggcaggagctgagatgtggcagcggcgtgtttatccacaacgatgtggaggcctggatggaccgatataagtattatcccgagacaccccagggcctggccaagatcatccagaaggcccacaaggagggcgtgtgcggcctgcgctccgtgagcagactggagcaccagatgtgggaggccgtgaaggacgagctgaacaccctgctgaaggagaatggcgtggatctgagcatcgtggtggagaagcaggagggcatgtataagagcgccccccggcggctgaccgccacaaccgagaagctggagatcggctggaaggcctggggcaagagcatcctgtttgcccccgagctggccaacaatacctttgtgatcgatggccccgagaccaaggagtgccccacccagaaccgcgcctggaactctctggaggtggaggactttggcttcggcctgaccagcacccgcatgtttctgcgcgtgagagagagcaatacaacagagtgtgatagcaagatcatcggcacagccgtgaagaacaatctggccatccacagcgacctgagctattggatcgagagccgctttaacgacacatggaagctggagcgcgccgtgctgggcgaggtgaagagctgtacctggcccgagacccacacactgtggggcgatggcgtgctggagtctgacctgatcatcccaatcacactggccggccctcgcagcaaccacaaccgccgcccaggctataagacccagtcccagggcccctgggacgagggccgggtggagatcgacttcgattactgccccggcacaaccgtgacactgagcgagtcttgtggccaccgcggccctgccacccggacaaccacagagtctggcaagctgatcaccgattggtgttgtcggtcctgcaccctgcctcctctgcggtatcagaccgacaatggctgttggtacggcatggagatcagaccccagcggcacgacgagaagacactggtgcagtcccaggtgaacgcctacaacgccgatatgatcgatccattccagctgggcctgctggtggtgttcctggccacccaggaggtgctgcgcaagcggtggacagccaagatcagcatgcctgccatcctgatcgccctgctggtgctggtgttcggcggcatcacctacaccgacgtgctgagatacgtgatcctggtgggcgccgccttcgccgagtccaacagcggcggcgatgtggtgcacctggccctgatggccacattcaagatccagcccgtgtttatggtggcctctttcctgaaggcccgctggaccaatcaggagaatatcctgctgatgctggccgccgcctttttccagatggcctattacgatgcccggcagatcctgctgtgggagatgcccgatgtgctgaactccctggccgtggcctggatgatcctgcgggccatcaccttcacaacaacatccaatgtggtggtgcctctgctggccctgctgacacccggcctgagatgtctgaatctggacgtgtataggatcctgctgctgatggtgggcatcggcagcctgatccgcgagaagcgcagcgccgccgccaagaagaagggcgccagcctgctgtgcctggccctggccagcaccggctttttcaaccccatgatcctggccgccggcctggtggcctgtgatcccaatcggaagcggggctggccagccacagaggtaatgacagccgtgggcctgatgttcgccatcgtgggcggcctggccgagctggacatcgatagcatggccatccctatgaccatcgccggcctgatgtttgccgcctttgtgatcagcggcaagagcaccgacatgtggatcgagcggaccgccgacatcagctgggagggcgatgccgagatcacaggctctagcgagcgggtggatgtgcggctggacgatgacggcaacttccagctgatgaacgatccaggcgccccctggaagatatggatgctgcggatggcctgcctggccatcagcgcctacaccccctgggccatcctgccctccgtggtgggcttttggatcaccctgcagtacaccaagcggggcggcgtgctgtgggatacaccttctcccaaggagtataagcgcggcgataccaccaccggcgtgtatcgcatcatgacacgcggcctgctgggcagctaccaggccggcgccggcgtgatggtggagggcgtgttccacaccctgtggcacaccaccaagggcgccgccctgatgtccggcgagggcaggctggacccctattggggctccgtgaaggaggaccggctgtgctatggcggcccctggaagctgcagcacaagtggaacggccaggatgaggtgcagatgatcgtggtggagcccggcaagaatgtgaagaacgtgcagacaaagcccggcgtgtttaagacacctgagggcgagatcggcgccgtgacactggacttccccaccggcacctccggctctcccatcgtggacaagaatggcgatgtgatcggcctgtatggcaatggcgtgatcatgcctaatggcagctacatctctgccatcgtgcagggcgagcggatggatgagccagtgcctgccggcttcgagcccgagatgctgcgcaagaagcagatcaccgtgctggacctgcacccaggcgccggcaagacccggcggatactgcctcagatcatcaaggaggccatcaatcggaggctgagaaccgccgtgctggcccctacaagggtggtggccgccgagatggccgaggccctgcggggcctgcccatccgctaccagaccagcgccgtggccagagagcacaacggcaatgagatcgtggatgtgatgtgccacgccaccctgacccacagactgatgagccctcacagagtgccaaactataatctgttcgtgatggatgaggcccacttcacagatccagccagcatcgccgcccgcggctacatctctaccagagtggagctgggcgaggccgccgccatctttatgaccgccaccccacctggcacatccgatccatttcccgagtccaatgcccctatctctgacctgcagacagagatccccgacagagcctggaatagcggctacgagtggatcaccgagtatatcggcaagaccgtgtggtttgtgccctctgtgaagatgggcaatgagatcgccctgtgcctgcagagagccggcaagaaggtaatccagctgaatcggaagtcgtacgagaccgagtatcccaagtgcaagaacgatgactgggacttcgtggtgaccacagacatctctgagatgggcgccaacttcaaggccagccgcgtgatcgactctcggaagtccgtgaagcctaccatcatcaccgagggcgagggccgggtaatcctgggcgagccttctgccgtgaccgccgccagcgccgcccagcgccgcggccggatcggccggaaccctagccaggtgggcgatgagtactgttatggcggccacaccaatgaggatgacagcaactgtgcccactggaccgaggcccgcatcatgctggataacatcaacatgcccaacggcctgatcgcccagttttatcagccagagcgcgagaaggtgtatacaatggatggcgagtaccgcctgagaggcgaggagcggaagaatttcctggagctgctgcgcaccgccgatctgcccgtgtggctggcctataaggtggccgccgccggcgtgagctatcacgaccgccgctggtgctttgacggccctaggacaaatacaatcctggaggataacaatgaggtggaggtaatcaccaagctgggcgagcggaagatcctgagacccagatggatcgacgccagggtgtactctgatcaccaggccctgaagagcttcaaggactttgccagcggcaagcgcagccagatcggctttatcgaggtgctgggcaagatgcccgagcactttatgggcaagacctgggaggccctggataccatgtatgtggtggccacagccgagaagggcggcagagcccaccggatggccctggaggagctgcccgatgccctgcagaccatcgccctgatcgccctgctgtctgtgatgacaatgggcgtgtttttcctgctgatgcagcggaagggcatcggcaagatcggcctgggcggcgtggtgctgggcgccgccaccttcttctgttggatggccgaggtgcctggcaccaagatcgccggcatgctgctgctgtctctgctgctgatgatcgtgctgatccccgagcctgagaagcagcggagccagacagacaaccagctggccgtgttcctgatctgcgtgctgaccctggtgggcgccgtggccgccaacgagatgggctggctggacaagaccaagtctgacatctctggcctgtttggccagcggatcgagaccaaggagaatttttccatcggcgagtttctgctggacctgcgccccgccaccgcctggagcctgtatgccgtgacaacagccgtgctgacaccactgctgaagcacctgatcacctccgattacatcaacaccagcctgacatccatcaacgtgcaggccagcgccctgtttaccctggcccgcggctttccctttgtggacgtgggcgtgagcgccctgctgctggccgccggctgttggggccaggtgaccctgaccgtgacagtgacatccgccacactgctgttttgtcactacgcctatatggtgcctggctggcaggccgaggccatgaggtccgcccagagacgcaccgccgccggcatcatgaagaacgccgtggtggatggcatcgtggccacagacgtgcccgagctggagcggaccacacccatcatgcagaagaaggtgggccaggtaatgctgatcctggtgagcctggccgccctggtggtgaaccccagcgtgaagacagtgcgcgaggccggcatcctgatcacagccgccgccgtgacactgtgggagaatggcgcctccagcgtgtggaatgccaccacagccatcggcctgtgccacatcatgcggggcggctggctgagctgcctgagcatcacctggaccctggtgaagaacatggagaagcctggcctgaagcggggcggcgccaagggccggaccctgggcgaggtgtggaaggagcgcctgaatcagatgacaaaggaggagtttatccggtacagaaaggaggccatcaccgaggtggaccgctctgccgccaagcacgcccggaaggagaggaacatcaccggcggccaccccgtgagccgcggcacagccaagctgcggtggctggtggagcgccgctttctggagcctgtgggcaaggtaatcgatctgggctgtggccgcggcggctggtgttactacatggccacccagaagcgggtgcaggaggtgaggggctataccaagggcggccccggccacgaggagccccaactagtgcagtcctacggctggaatatcgtgacaatgaagtccggcgtggatgtattctacaggccttccgagtgctgcgatacactgctgtgcgacatcggcgagagcagctctagcgccgaggtggaggagcaccggacactgcgggtgctggagatggtggaggattggctgcaccggggcccaaaggagttctgcgtgaaggtgctgtgcccctatatgcctaaggtaatcgagaagatggagctgctgcagaggcgctatggcggcggcctggtgagaaatccactgtcccgcaatagcacccacgagatgtactgggtgtctcgggcctccggcaacgtggtgcactccgtgaatatgacaagccaggtgctgctgggccgcatggagaagaagacatggaagggcccccagtacgaggaggatgtgaatctgggctccggcacaagagccgtgggcaagccactgctgaatagcgataccagcaagatcaagaatcgcatcgagagactgcggcgcgagtatagcagcacatggcaccacgacgagaaccacccatatcgcacctggaactaccacggctcttatgaggtgaagccaaccggcagcgccagctctctggtgaatggcgtggtgcgcctgctgtccaagccctgggataccatcaccaatgtgaccacaatggccatgaccgacaccacacccttcggccagcagcgggtgtttaaggagaaggtggatacaaaggcccccgagccacctgagggcgtgaagtatgtgctgaatgagacaaccaactggctgtgggcctttctggccagggagaagagacccaggatgtgcagcagggaggagtttatcagaaaggtgaacagcaatgccgccctgggcgccatgttcgaggagcagaatcagtggcgctctgccagggaggccgtggaggaccccaagttttgggagatggtggatgaggagcgggaggcccacctgcgcggcgagtgtcacacctgcatctacaacatgatgggcaagcgggagaagaagcccggcgagttcggcaaggccaagggctctcgcgccatctggttcatgtggctgggcgcccgctttctggagttcgaggccctgggcttcctgaacgaggaccactggctgggccggaagaatagcggcggcggcgtggagggcctgggcctgcagaagctgggctacatcctgcgcgaggtgggcacacgccctggcggcaggatctatgccgatgataccgccggctgggatacacgcatcacacgggccgacctggagaacgaggccaaggtgctggagctgctggatggcgagcacagacggctggccagagccatcatcgagctgacctatcggcacaaggtggtgaaggtaatgcgccctgccgccgatggcaggaccgtgatggacgtgatcagccgggaggaccagcgcggcagcggccaggtggtgacctatgccctgaatacattcacaaatctggccgtgcagctggtgcgcatgatggagggcgagggcgtgatcggccccgacgatgtggagaagctgacaaagggcaagggccctaaggtgcggacctggctgtctgagaatggcgaggagcggctgagccggatggccgtgagcggcgatgattgcgtggtgaagccactggatgatcgctttgccacatccctgcactttctgaacgccatgtccaaggtgcgcaaggacatccaggagtggaagcccagcacaggctggtacgattggcagcaggtgcccttctgtagcaaccacttcaccgagctgatcatgaaggacggcagaaccctggtgaccccttgcaggggccaggatgagctggtgggccgcgcccgcatcagccctggcgccggctggaatgtgcgggacaccgcctgcctggccaagagctacgcccagatgtggctgctgctgtacttccaccgccgggacctgcggctgatggccaacgccatctgctctgccgtgcctgtgaattgggtgcccacaggcagaacaacctggagcatccacgccggcggcgagtggatgaccaccgaggacatgctggaggtgtggaacagagtgtggatcgaggagaacgagtggatggaggacaagacccccgtggagaagtggtctgatgtgccctacagcggcaagcgggaggacatctggtgtggcagcctgatcggcacacgcgcccgggccacatgggccgagaacatccaggtggccatcaaccaggtgcgcagcatcatcggcgatgagaagtatgtggactacatgagcagcctgaaaagatacgaagatactacactggtggaagataccgtcctgtgaatactttgttaattgtaaataaatattgttattatgtgtagaagtttagctttataatagtgtttagtgtgtttagagttagaaaaattttagtgaggaagtcaggccggaaaattcccgccaccggaagttgagtagacggtgctgcctgcgactcaaccccaggaggactgggtgaacaaagctgcgaagtgatccatgtaagccctcagaaccgtctcggaaagaggaccccacatgttgtagcttcaaggcccaatgtcagaccacgccatggcgtgccactctgcggagagtgcagtctgcgacagtgccccaggaggactgggtgaacaaaggcgaatcaacgtcccacgcggccctagctctggcaatggtgttaaccagagtgaaaggactagaggttagaggagaccccgcgttctgaagtgcacggcccagcctggctgaagctgtaggtcaggggaaggactagaggttagtggagaccccgtgccgcaaaacaccacaacaacacagcatattgacacctgggatagactaggagatcttctgctctgcacaaccagccacacggcacagtgcgccgacaatggtggctggtggtgcgagaacacaggatct

SEQ ID NO: 38 - DNA, 10302 bp, synthetic construct
  source 1..10302: mol_type = other DNA
atgtctaagaaaccaggagggcccggcaaaagccgggctgtcaatatgctaaaacgcggaatgccccgcgtgttgagtctgaccggactgaagcgggccatgctgagcctgatcgacggccgcggccctacacggttcgtgctggccctgctggcctttttccggttcacagcaattgccccaacacgggccgtgctggatcgctggcggagcgtgaacaagcagaccgccatgaagcacctgctgtcttttaagaaggagctgggcacactgacaagcgccatcaatcggagaagcagcaagcagaagaagcggggcggcaagacaggcatcgccttcatgatcggcctgatcgccggcgtgggcgccgtgacactgtctaactttcagggcaaggtaatgatgaccgtgaatgccacagacgtgaccgacatcatcacaatccccacagccgccggcaagaatctgtgcatcgtgagagccatggatgtgggccacatgtgcgatgataccatcacctacgagtgtccagtgctgtctgccggcaatgatcctgaggacatcgactgttggtgtaccaagctggccgtgtacgtgaggtacggccgctgcaccaagacacggcacagcaggcgcagccgcagaagcctgaccgtgcagacacacggcgagagcaccctgagcaataagaagggcgcctggatggacagcacaaaggccacccgctacctggtgaagacagagtcctggatactgagaaatcccggctatgccctggtggccgccgtgatcggctggatgctgggcagcaataccatgcagcgcgtggtgtttgccgtgctgctgctgctggtggcccccgcctatagcttcaactgcctgggcatgtctaaccgcgattttctggagggcgtgtccggcgccacatgggtggacctggtgctggagggcgactcttgtgtgaccatcatgagcaaggataagcccaccatcgacgtgaagatgatgaacatggaggccgccaacctggccgaggtgcgctcctattgttacctggccacagtgtctgagctgtctacaaaggccgcctgtcccacaatgggcgaggcccacaacgacaagagggccgacccctcctttgtatgcaagcagggcgtggtggaccggggctggggcaatggctgtggcctgttcggcaagggcagcatcgatacatgcgccaagtttgcctgttctaccaaggccacaggccgcaccatcctgaaggagaatatcaagtacgaggtggccatctttgtgcacggccccaccaccgtggagagccacggcaattacttcacccagacaggcgccgcccaggccggcaggttctctatcacacccgccgccccctcttacacccttaagctgggcgagtatggcgaggtgaccgtggattgcgagccacgcagcggcatcgatacaagcgcctattacgtgatgacagtgggcaccaagacctttctggtgcaccgcgagtggttcatggatctgaatctgccctggtccagcgccgagagcaatgtatggcgcaatcgggagacactgatggagtttgaggagcctcacgccacaaagcagagcgtgatcgccctgggcagccaggagggcgccctgcaccaggccctggccggcgccatccccgtggagttttctagcaacaccgtgaagctgacaagcggccacctgaagtgcagagtgaagatggagaagctgcagctgaagggcacaacctacggcgtgtgcagcaaggccttccggttcctgggcacccctgccgataccggccacggcaccgtggtgctggagctgcagtataccggcaccgatggcccctgcaagatccccatctcttccgtggccagcctgaatgatctgacacccgtgggccgcctggtgacagtgaatcctttcgtgtccgtgtctaccgccaacgccaaggtgctgatcgagctggagcccccctttggcgatagctatatcgtggtgggccgcggcgagcagcagatcaaccaccactggcacaagagcggctcttctatcggcaaggccttcacagccaccctgaagggcgcccagagactggccgccctgggcgatacagcctgggacttcggctctgtgggcggcgtgtttaccagcgtgggcaaggccgtgcaccaggtgtttggcggcgcctttaggtccctgtttggcggcatgagctggatcacccagggcctgctgggcgccctgctgctgtggatgggcatcaacgcccgcgatagatccatcgccctgaccttcctggccgtgggcggcgtgctgctgttcctgtccgtgaacgtgcacgccgacaccggctgcgccatcgacatctctaggcaggagctgagatgtggcagcggcgtgtttatccacaacgatgtggaggcctggatggaccgatataagtattatcccgagacaccccagggcctggccaagatcatccagaaggcccacaaggagggcgtgtgcggcctgcgctccgtgagcagactggagcaccagatgtgggaggccgtgaaggacgagctgaacaccctgctgaaggagaatggcgtggatctgagcatcgtggtggagaagcaggagggcatgtataagagcgccccccggcggctgaccgccacaaccgagaagctggagatcggctggaaggcctggggcaagagcatcctgtttgcccccgagctggccaacaatacctttgtgatcgatggccccgagaccaaggagtgccccacccagaaccgcgcctggaactctctggaggtggaggactttggcttcggcctgaccagcacccgcatgtttctgcgcgtgagagagagcaatacaacagagtgtgatagcaagatcatcggcacagccgtgaagaacaatctggccatccacagcgacctgagctattggatcgagagccgctttaacgacacatggaagctggagcgcgccgtgctgggcgaggtgaagagctgtacctggcccgagacccacacactgtggggcgatggcgtgctggagtctgacctgatcatcccaatcacactggccggccctcgcagcaaccacaaccgccgcccaggctataagacccagtcccagggcccctgggacgagggccgggtggagatcgacttcgattactgccccggcacaaccgtgacactgagcgagtcttgtggccaccgcggccctgccacccggacaaccacagagtctggcaagctgatcaccgattggtgttgtcggtcctgcaccctgcctcctctgcggtatcagaccgacaatggctgttggtacggcatggagatcagaccccagcggcacgacgagaagacactggtgcagtcccaggtgaacgcctacaacgccgatatgatcgatccattccagctgggcctgctggtggtgttcctggccacccaggaggtgctgcgcaagcggtggacagccaagatcagcatgcctgccatcctgatcgccctgctggtgctggtgttcggcggcatcacctacaccgacgtgctgagatacgtgatcctggtgggcgccgccttcgccgagtccaacagcggcggcgatgtggtgcacctggccctgatggccacattcaagatccagcccgtgtttatggtggcctctttcctgaaggcccgctggaccaatcaggagaatatcctgctgatgctggccgccgcctttttccagatggcctattacgatgcccggcagatcctgctgtgggagatgcccgatgtgctgaactccctggccgtggcctggatgatcctgcgggccatcaccttcacaacaacatccaatgtggtggtgcctctgctggccctgctgacacccggcctgagatgtctgaatctggacgtgtataggatcctgctgctgatggtgggcatcggcagcctgatccgcgagaagcgcagcgccgccgccaagaagaagggcgccagcctgctgtgcctggccctggccagcaccggctttttcaaccccatgatcctggccgccggcctggtggcctgtgatcccaatcggaagcggggctggccagccacagaggtaatgacagccgtgggcctgatgttcgccatcgtgggcggcctggccgagctggacatcgatagcatggccatccctatgaccatcgccggcctgatgtttgccgcctttgtgatcagcggcaagagcaccgacatgtggatcgagcggaccgccgacatcagctgggagggcgatgccgagatcacaggctctagcgagcgggtggatgtgcggctggacgatgacggcaacttccagctgatgaacgatccaggcgccccctggaagatatggatgctgcggatggcctgcctggccatcagcgcctacaccccctgggccatcctgccctccgtggtgggcttttggatcaccctgcagtacaccaagcggggcggcgtgctgtgggatacaccttctcccaaggagtataagcgcggcgataccaccaccggcgtgtatcgcatcatgacacgcggcctgctgggcagctaccaggccggcgccggcgtgatggtggagggcgtgttccacaccctgtggcacaccaccaagggcgccgccctgatgtccggcgagggcaggctggacccctattggggctccgtgaaggaggaccggctgtgctatggcggcccctggaagctgcagcacaagtggaacggccaggatgaggtgcagatgatcgtggtggagcccggcaagaatgtgaagaacgtgcagacaaagcccggcgtgtttaagacacctgagggcgagatcggcgccgtgacactggacttccccaccggcacctccggctctcccatcgtggacaagaatggcgatgtgatcggcctgtatggcaatggcgtgatcatgcctaatggcagctacatctctgccatcgtgcagggcgagcggatggatgagccagtgcctgccggcttcgagcccgagatgctgcgcaagaagcagatcaccgtgctggacctgcacccaggcgccggcaagacccggcggatactgcctcagatcatcaaggaggccatcaatcggaggctgagaaccgccgtgctggcccctacaagggtggtggccgccgagatggccgaggccctgcggggcctgcccatccgctaccagaccagcgccgtggccagagagcacaacggcaatgagatcgtggatgtgatgtgccacgccaccctgacccacagactgatgagccctcacagagtgccaaactataatctgttcgtgatggatgaggcccacttcacagatccagccagcatcgccgcccgcggctacatctctaccagagtggagctgggcgaggccgccgccatctttatgaccgccaccccacctggcacatccgatccatttcccgagtccaatgcccctatctctgacctgcagacagagatccccgacagagcctggaatagcggctacgagtggatcaccgagtatatcggcaagaccgtgtggtttgtgccctctgtgaagatgggcaatgagatcgccctgtgcctgcagagagccggcaagaaggtaatccagctgaatcggaagtcgtacgagaccgagtatcccaagtgcaagaacgatgactgggacttcgtggtgaccacagacatctctgagatgggcgccaacttcaaggccagccgcgtgatcgactctcggaagtccgtgaagcctaccatcatcaccgagggcgagggccgggtaatcctgggcgagccttctgccgtgaccgccgccagcgccgcccagcgccgcggccggatcggccggaaccctagccaggtgggcgatgagtactgttatggcggccacaccaatgaggatgacagcaactgtgcccactggaccgaggcccgcatcatgctggataacatcaacatgcccaacggcctgatcgcccagttttatcagccagagcgcgagaaggtgtatacaatggatggcgagtaccgcctgagaggcgaggagcggaagaatttcctggagctgctgcgcaccgccgatctgcccgtgtggctggcctataaggtggccgccgccggcgtgagctatcacgaccgccgctggtgctttgacggccctaggacaaatacaatcctggaggataacaatgaggtggaggtaatcaccaagctgggcgagcggaagatcctgagacccagatggatcgacgccagggtgtactctgatcaccaggccctgaagagcttcaaggactttgccagcggcaagcgcagccagatcggctttatcgaggtgctgggcaagatgcccgagcactttatgggcaagacctgggaggccctggataccatgtatgtggtggccacagccgagaagggcggcagagcccaccggatggccctggaggagctgcccgatgccctgcagaccatcgccctgatcgccctgctgtctgtgatgacaatgggcgtgtttttcctgctgatgcagcggaagggcatcggcaagatcggcctgggcggcgtggtgctgggcgccgccaccttcttctgttggatggccgaggtgcctggcaccaagatcgccggcatgctgctgctgtctctgctgctgatgatcgtgctgatccccgagcctgagaagcagcggagccagacagacaaccagctggccgtgttcctgatctgcgtgctgaccctggtgggcgccgtggccgccaacgagatgggctggctggacaagaccaagtctgacatctctggcctgtttggccagcggatcgagaccaaggagaatttttccatcggcgagtttctgctggacctgcgccccgccaccgcctggagcctgtatgccgtgacaacagccgtgctgacaccactgctgaagcacctgatcacctccgattacatcaacaccagcctgacatccatcaacgtgcaggccagcgccctgtttaccctggcccgcggctttccctttgtggacgtgggcgtgagcgccctgctgctggccgccggctgttggggccaggtgaccctgaccgtgacagtgacatccgccacactgctgttttgtcactacgcctatatggtgcctggctggcaggccgaggccatgaggtccgcccagagacgcaccgccgccggcatcatgaagaacgccgtggtggatggcatcgtggccacagacgtgcccgagctggagcggaccacacccatcatgcagaagaaggtgggccaggtaatgctgatcctggtgagcctggccgccctggtggtgaaccccagcgtgaagacagtgcgcgaggccggcatcctgatcacagccgccgccgtgacactgtgggagaatggcgcctccagcgtgtggaatgccaccacagccatcggcctgtgccacatcatgcggggcggctggctgagctgcctgagcatcacctggaccctggtgaagaacatggagaagcctggcctgaagcggggcggcgccaagggccggaccctgggcgaggtgtggaaggagcgcctgaatcagatgacaaaggaggagtttatccggtacagaaaggaggccatcaccgaggtggaccgctctgccgccaagcacgcccggaaggagaggaacatcaccggcggccaccccgtgagccgcggcacagccaagctgcggtggctggtggagcgccgctttctggagcctgtgggcaaggtaatcgatctgggctgtggccgcggcggctggtgttactacatggccacccagaagcgggtgcaggaggtgaggggctataccaagggcggccccggccacgaggagccccaactagtgcagtcctacggctggaatatcgtgacaatgaagtccggcgtggatgtattctacaggccttccgagtgctgcgatacactgctgtgcgacatcggcgagagcagctctagcgccgaggtggaggagcaccggacactgcgggtgctggagatggtggaggattggctgcaccggggcccaaaggagttctgcgtgaaggtgctgtgcccctatatgcctaaggtaatcgagaagatggagctgctgcagaggcgctatggcggcggcctggtgagaaatccactgtcccgcaatagcacccacgagatgtactgggtgtctcgggcctccggcaacgtggtgcactccgtgaatatgacaagccaggtgctgctgggccgcatggagaagaagacatggaagggcccccagtacgaggaggatgtgaatctgggctccggcacaagagccgtgggcaagccactgctgaatagcgataccagcaagatcaagaatcgcatcgagagactgcggcgcgagtatagcagcacatggcaccacgacgagaaccacccatatcgcacctggaactaccacggctcttatgaggtgaagccaaccggcagcgccagctctctggtgaatggcgtggtgcgcctgctgtccaagccctgggataccatcaccaatgtgaccacaatggccatgaccgacaccacacccttcggccagcagcgggtgtttaaggagaaggtggatacaaaggcccccgagccacctgagggcgtgaagtatgtgctgaatgagacaaccaactggctgtgggcctttctggccagggagaagagacccaggatgtgcagcagggaggagtttatcagaaaggtgaacagcaatgccgccctgggcgccatgttcgaggagcagaatcagtggcgctctgccagggaggccgtggaggaccccaagttttgggagatggtggatgaggagcgggaggcccacctgcgcggcgagtgtcacacctgcatctacaacatgatgggcaagcgggagaagaagcccggcgagttcggcaaggccaagggctctcgcgccatctggttcatgtggctgggcgcccgctttctggagttcgaggccctgggcttcctgaacgaggaccactggctgggccggaagaatagcggcggcggcgtggagggcctgggcctgcagaagctgggctacatcctgcgcgaggtgggcacacgccctggcggcaggatctatgccgatgataccgccggctgggatacacgcatcacacgggccgacctggagaacgaggccaaggtgctggagctgctggatggcgagcacagacggctggccagagccatcatcgagctgacctatcggcacaaggtggtgaaggtaatgcgccctgccgccgatggcaggaccgtgatggacgtgatcagccgggaggaccagcgcggcagcggccaggtggtgacctatgccctgaatacattcacaaatctggccgtgcagctggtgcgcatgatggagggcgagggcgtgatcggccccgacgatgtggagaagctgacaaagggcaagggccctaaggtgcggacctggctgtctgagaatggcgaggagcggctgagccggatggccgtgagcggcgatgattgcgtggtgaagccactggatgatcgctttgccacatccctgcactttctgaacgccatgtccaaggtgcgcaaggacatccaggagtggaagcccagcacaggctggtacgattggcagcaggtgcccttctgtagcaaccacttcaccgagctgatcatgaaggacggcagaaccctggtgaccccttgcaggggccaggatgagctggtgggccgcgcccgcatcagccctggcgccggctggaatgtgcgggacaccgcctgcctggccaagagctacgcccagatgtggctgctgctgtacttccaccgccgggacctgcggctgatggccaacgccatctgctctgccgtgcctgtgaattgggtgcccacaggcagaacaacctggagcatccacgccggcggcgagtggatgaccaccgaggacatgctggaggtgtggaacagagtgtggatcgaggagaacgagtggatggaggacaagacccccgtggagaagtggtctgatgtgccctacagcggcaagcgggaggacatctggtgtggcagcctgatcggcacacgcgcccgggccacatgggccgagaacatccaggtggccatcaaccaggtgcgcagcatcatcggcgatgagaagtatgtggactacatgagcagcctgaaaagatacgaagatactacactggtggaagataccgtcctgtga

SEQ ID NO: 39 - DNA, 10700 bp, synthetic construct
  source 1..10700: mol_type = other DNA
agttgttagtctgcgtggaccgacaagaacagtttcgactcggaagcttgcttaacgtagtgctaacagttttttattagagagcagatctctgatgaacaaccaacggaaaaagacgggaaaaccgtctatcaatatgctgaaacgcgtgagaaaccgtgtgtcaactggatcacagttggcgaagagattctcaaaaggattgctgaacggccagggaccaatgaaattggtcatggcgttcatagccttccttagatttctggccattccaccaacagcaggagttttggccagatggggaaccttcaagaagtcgggggccattaaggtcctgaaaggcttcaagagggagatctcaaacatgctgagcataatcaacaaacggaaaaagacatcgctctgtctcatgatgatattgccagcagcacttgctttccacttgacttcacgagatggagagccgcgcatgattgtggggaagaatgaaagaggaaaatccctactttttaagacagcctctggaattaacatgtgcacactcatagccatggacttgggagagatgtgtgatgatacggtcacttacaaatgtccccacatcactgaagtggaacctgaagacattgactgctggtgcaaccttacatcaacatgggtgacttatggaacgtgcaatcaagctggagagcatagacgtgacaagagatcagtggcgttagctccccatgtcggcatgggactggacacacgcacccaaacctggatgtcggctgaaggagcttggagacaagttgagaaggtagagacatgggcccttaggcacccagggttcaccatactagccctatttcttgcccattacataggcacctccttgacccagaaggtggttatttttatactactaatgttggtcaccccatccatgacaatgagatgtgtgggagtgggaaacagagattttgtggaaggtctgtcaggagctacgtgggttgacgtggtgctagagcacggggggtgtgtgaccaccatggctaagaacaagcccacgctggatatagagcttcagaagaccgaggccacccaactggcgaccctaaggaagctatgcattgaggggaaaattaccaatataacaactgactcaagatgtcctacccaaggggaagcagttttgcctgaggagcaggaccagaattacgtgtgtaagcatacatacgtagacagaggctgggggaacggttgtggtttgtttggcaagggaagcttggtaacatgtgcgaaatttcaatgcctggaattgatagagggaaaagtggtgcaatatgagaacctcaaatacactgtcatcattacagtgcacacaggagaccaacaccaggtgggaaatgaaacgcagggagtcacggctgagataacgcctcaggcatcaactactgaagccatcttgcctgagtatggaacccttgggctagaatgctcaccacggacaggtctggatttcaatgaaatgatcttactaacaatgaagaacaaagcatggatggtacacagacaatggttttttgacctacctttaccatggacatcaggagctacaacagaaacaccaacttggaataggaaggagctccttgtgacattcaaaaatgcacatgcgaaaaaacaagaagtagttgtccttggatcgcaagagggagcaatgcataccgcactgacaggagccacagaaatccaaaacacaggaggcacaagcatttttgcggggcacttaaagtgtagactcaagatggacaaattggaactcaaagggatgagctatgcaatgtgcacgaatacctttgtgttgaagaaagaagtctcagaaacacagcatgggacaatactcattaaggtcgagtacaaaggggaagatgcaccttgcaagattcctttctccacagaggatggacaagggaaagcccacaatggcagactgatcacagccaatccagtggtgactaagaaggaggagcctgttaacattgaggctgaacctccttttggggaaagtaatatagtgattggaactggagacaatgccttgaaaatcaactggtacaagaagggaagctctattgggaagatgttcgaagccactgccagaggtgcaaggcgcatggccatcttgggagacacagcttgggactttggatcagtgggtggtgttctgaactcattaggcaaaatggtgcaccaaatattcggaagtgcctacacagccctgttcagtggagtctcttgggtgatgaaaattggaataggtgtcctcctgacttggatagggttgaattcaaaaaacacatccatgtcattttcatgcattgcaataggaatcatcacactctatctgggagttgtggtacaagctgacatggggtgtgtcataaactggaaaggcaaagaacttaaatgtggaagtggaattttcgtcaccaacgaggtccatacctggacagagcagtacaaattccaagcggattccccaaaaagattggcgacagctattgcaggcgcttgggaaaatggagtgtgcggaattaggtcaacaaccagaatggagaatcttttgtggaagcaaatagccaatgaactgaactacatattatgggaaaacaatatcaaattaacggtggttgtgggcgacacaattggggtcttagagcaaggaaaaagaacactaacaccacaacccatggagctgaaatactcatggaaaacgtggggaaaggcaaaaatagtgacagctgaaacacaaaattcctctttcataatagatggaccaaacacaccggagtgtccaagtgcctcaagagcatggaatgtgtgggaggtggaagattacgggtttggagtcttcacaaccaacatatggctgaaactccgagaggtgtacacccaaatgtgtgaccataggctaatgtcagcagccgtcaaggatgagagggccgtacatgccgacatgggctattggatagaaagccaaaagaatggaagttggaagctagaaaaagcatccctcatagaggtgaaaacttgcacatggccaaaatcacacactctttggagcaacggtgtgctagagagtgacatgatcattccaaagagtctagccggtcctatttcgcaacacaactacaggcccgggtaccacacccaaacggcaggaccctggcacttaggaaaattggagctggacttcaactattgtgaaggaacaacagttgtcatcgcagaaaattgtgggacaagaggcccatcattgagaacgacaacagtgtcaggaaagttgatacacgaatggtgttgccgctcgtgcacacttcctcctctgcgatacatgggagaagacggctgttggtatggcatggaaatcagacccatcagtgagaaagaagaaaacatggtaaagtctttagtctcagcgggaagtggaaaggtagacaacttcacaatgggtgtcttgtgtttggcaatcctttttgaagaggtgatgagaggaaaatttgggaagaaacacatgattgcaggggttttcttcacatttgtgctccttctctcagggcaaataacatggagagacatggcgcacacactaataatgattgggtccaacgcctctgacaggatgggaatgggcgtcacctatctagctttaattgcaacatttaaaatccagccattcctggctttgggattttttctaagaaaactgacatctagagaaaatttactgttaggagttggactggctatggcaacaacgttacaattgccagaggacattgaacaaatggcaaatggaatcgccctggggctcatggctcttaaattgataacacaatttgaaatataccaattatggacggctttaatctccttaacgtgttcaaacacgattttcacgttgactgttgcctggagaacagccactctgattttggccggagtttcacttttaccagtgtgccagtcttcgagcatgaggaaaacagactggcttccaatgacagtggcagctatgggagtcccacctctaccactctttatttttagcttgaaagatacactcaaaaggagaagctggccactgaatgaaggggtgatggctgttgggcttgtgagcattctggccagctctctccttagaaatgacgtgcccatggctggaccattagtggccgggggcttgctgatagcgtgctacgtcataactggcacgtcagcagaccttacagtagaaaaagcagcagatgtaacatgggaggaagaggctgagcaaacaggagtttcccacaacttaatgatcacagttgatgatgatggaacaatgagaataaaagatgatgagactgagaatattctaacagtgcttttaaagacagcattactaatagtatcaggtatttttccatactccatacccgcaacattgttggtctggcatacttggcaaaaacaaacccaaagatccggtgttctatgggacgtacccagccccccagagacacagaaagcagaactggaagaaggggtctataggatcaagcagcaaggaatccttgggaaaacccaagtaggggttggagtacaaaaagaaggagtcttccacaccatgtggcacgtcacaagaggggcagtgttgacacataatgggaaaagactggaaccaaactgggctagtgtgaaaaaagatctgatttcatacggaggaggatggagattgagcgcacaatggcaaaagggggaggaggtgcaggttattgccgtagagcctgggaagaacccaaagaactttcaaaccatgccaggcacatttcagactacaacaggggaaataggagcaattgctctggatttcaagcctggaacttcagggtctcctatcataaacagagagggaaaggtagtgggactatatggcaatggagtggttacaaagaatggcggctacgtcagcggaatagcgcaaacaaatgcagaaccagatggaccgacgccagagttggaagaagagatgttcaaaaagcgaaatctaaccataatggatcttcatcctgggtcaggaaagacacggaaataccttccagccattgttagagaggcaatcaagagacgtttaagaactctaattttggcaccgacaagggtggttgcagctgagatggaagaagcattgaaagggctcccaataaggtaccaaacaacagcaacaaaatctgaacacacgggaagagagattgttgatctaatgtgccacgcaacgttcacaatgcgcttgctgtcaccagttagggttccaaactataacttgataataatggatgaagcccatttcacagacccagccagtatagcggccagagggtacatatcaactcgtgttggaatgggagagacagccgcaatttttatgacggcaacgccccctggaacagctgatgcctttcctcagagcaacgctccaattcaagatgaagaaagggacataccagaacgctcatggaattcaggcaatgaatggattaccgactttgccgggaaaacggtgtggtttgtccccagcatcaaagccggaaatgacatagcaaactgcttgcgaaagaacgggaaaaaggtcattcaacttagtaggaagacttttgaaacagaatatcagaagactaaactaaatgattgggacttcgtggtgacaactgacatttcagaaatgggggccaatttcaaagcagacagagtgatcgacccaagaagatgtctaaaaccagtgatcctgacagatggaccagagcgggtgatcctggctggaccaatgccagtcaccgcggcgagtgctgcgcaaaggagagggagagttggcaggaacccacataaagaaaatgaccagtacatattcacgggccagcctctcaacaatgatgaagaccatgctcactggacagaagcaaaaatgttgctggacaacatcaacactccagaaggaatcataccagctctctttgaaccagaaagggagaagtcagccgccatagacggtgaatatcgcctgaaaggtgaatccaggaagactttcgtagaactcatgaagaggggtgaccttccagtttggttagcccacaaagtagcatcagaggggatcaaatatacagatagaaaatggtgctttgatggacagcgcaacaatcaaattttagaggaaaacatggacgtggaaatctggacaaaggaaggagaaaagaaaaaattgagacctaggtggcttgatgcccgcacttattcagatcccttagcactcaaggaattcaaggactttgcggctggtagaaagtctatcgcccttgatcttgtgacagaaataggaagagtgccttcacacctagcccacaggacgagaaacgctctggacaatctggtgatgctgcacacgtcagaacatggcggtagggcctacaggcatgcggtggaggaactaccagaaacaatggaaacactcctactcctgggactcatgatcttactgacaggtggagcgatgcttttcttgatatcaggtaaagggattggaaagacttcaataggactcatttgcgtgattgcttccagcggcatgctgtggatggccgaaattccactccaatggatcgcatcggctatagtcctggagttttttatgatggtgttacttataccagaaccagaaaagcagagaaccccccaagacaaccaactcgcatatgtcgtaataggcatacttacattggctgcaataatagcggccaatgaaatgggactgttggaaactacaaagagagatttaggaatgtccaaggagccaggtgttgtttctccaactagctatttggatgtggacttgcacccagcatcagcctggacattgtacgccgtggccacgacagtaataacaccaatgttaagacataccatagagaattctacagcaaatgtgtccctggcagctatagccaaccaggcagtggtcctgatgggtttggacaaaggatggccaatatcaaaaatggacttaggcgtaccactactggcattgggttgctattcacaagtgaacccattgactctaacagcggcagtacttttgctaatcacacattatgctattataggtccaggactgcaggcaaaagccactcgtgaagctcaaaaaaggacagctgctggaattatgaagaatccaacggtggatgggataataacaatagatctagatcctgtaatatatgattcaaaatttgaaaagcaactgggacaggtcatgctcctggttttgtgcgcagttcaactgttgctaatgagaacatcatgggccttgtgtgaagctctaactttagctacgggaccaataacaacactctgggaaggatcacctgggaagttttggaataccacgatagctgtttccatggcgaacatttttagagggagctatttagcaggagctgggcttgccttttctatcatgaaatcagttggaacaggaaaaagaggaacaggctctcaaggtgaaactttaggagaaaaatggaaaaagaaattgaatcaattatcccggaaagagtttgacctttacaagaagtctggaatcactgaagtagatagaacagaagccaaagaagggttgaaaagaggagaaacaacacatcatgccgtgtcgagaggtagtgcaaaacttcaatggtttgtggagagaaacatggtcattcccgaaggaagagtcatagacctgggctgtggaagaggaggctggtcatattactgtgcaggactgaaaaaagtcacagaagtgcgagggtacacaaaaggcggtccaggacacgaagaaccagtgcctatgtcaacatatggatggaacatagttaagctaatgagtggaaaagatgttttctatcttccacctgaaaagtgtgacaccctgttgtgtgacattggagaatcttcaccaagcccaacagtggaagaaagcagaactataagagttttgaagatggttgaaccatggctaaaaaacaaccagttttgcattaaagtattgaacccttacatgccagccgtgattgagcacctagaaagactacaaaggaaacacggaggaatgcttgtgagaaatccactttcacgaaactccacgcacgaaatgtactggatatctaatggcacaggcaacattgtctcttcagtcaacatggtatccagattgttactgaacaggttcacgatgacacacaggagacctaccatagagaaagatgtggatttaggagcaggaactcgacatgtcaatgcggaaccagaaacacccaacatggaagtcattggggaaagaataaaaaggatcaaggaggagcataattcaacatggcactatgatgacgaaaacccctacaaaacgtgggcttaccacggatcttatgaagtcaaggccacaggctcagcctcctccatgataaatggagtcgtgaaacttctcactaaaccatgggatgtggtgcccatggtgacacagatggcaatgacagatacaactccattcggccagcagagagtctttaaagagaaagtggacaccaggacacccaggcctatgccagggacaagaaaggttatggagatcacagcggagtggctctggagaaccctggggaggaacaaaagacccaggttgtgcacaagggaagagtttacaaaaaaggtcagaaccaacgcagccatgggcgccgttttcacagaggagaaccaatgggacagtgcgaaagctgctgtagaggatgaagaattttggaaacttgtggatagagaacgtgaactccacaaattaggcaagtgcggaagctgtgtttacaacatgatgggcaagagagagaagaaacttggagagtttggcaaagcgaaaggcagtagggctatatggtacatgtggttgggagccaggtaccttgagttcgaagcccttggattcttgaatgaagaccactggttctcgcgtgaaaactcttacagtggagtagaaggagaaggactgcacaaactaggctacatattaagggacatttccaagatacccggaggagccatgtatgctgatgacacagctggttgggacacaagaataacagaagatgacctgcacaatgaggaaaagattacacagcaaatggaccctgaacacaggctgttagcgaacgctatatttaagctcacataccagaacaaagtggtcaaagttcaacgaccgactccaacgggcacggtaatggacatcatatctaggaaagaccaaagaggcagtggacaggtgggaacttatggtctgaatacatttaccaacatggaagcccagttagtcaggcaaatggaaggagaaggtgtgctgtcaaaggcagacctcgagaaccctcatctgccagaaaagaaaatcacacaatggttggaaaccaaaggagtggagaggttacaaagaatggccattagcggggatgactgcgtggtgaaaccaatcgatgacaggttcgctaacgccctgcttgctctgaacgatatgggaaaggttcggaaagacatacctcaatggcagccatcaaagggatggcatgactggcagcaggttcctttctgctcccaccacttccatgaattgattatgaaagatggaagaaagttggtggttccctgcagaccccaggacgaactaataggaagagcaagaatctctcaaggagcgggatggagtcttagagaaaccgcatgtttggggaaagcctacgcccaaatgtggagtctcatgtattttcacagaagagatctcagactagcgtccaatgccatatgttcagcagtaccagtccactgggtccccacaagcagaacgacatggtctattcatgctcaccatcagtggatgaccacagaagacatgcttactgtttggaacagggtgtggatcgaggacaatccatggatggaagacaaaactccagttacaacctgggagaatgttccatacctagggaagagagaagaccaatggtgcggatcactcattggtctcacttccagagcaacctgggctcagaacatatccacagcaattcaacaggtgagaagccttataggcaatgaagagtttctggactacatgccttcaatgaagagattcagaaaagacgaggagtcggagggagccatttggtaaacgcaggaagaggctaattgtcaggccaccttaagccacagtacggaagaagctgtgctgcctgtgagccccgtctaaggacgttaaaagaagaagtcaggccctaaagccacggtttgagcaaaccgtgctgcctgtagctccgtcgtggggacgtaaaaacctgggaggctgcaaactgtggaagctgtacgcacggtgtagcagactagcggttagaggagacccctcccatgacacaacgcagcagcggggcccgagcactgagtgaagctgtacctccttgcaaaggactagaggttagaggagaccccccgcaaacaaaaacagcatattgacgctgggagagaccagagatcctgctgtctcctcagcatcattccaggcacagaacgccagaaaatggaatggtgctgttgaatcaacaggttct

SEQ ID NO: 40 - DNA, 10173 bp, synthetic construct
  source 1..10173: mol_type = other DNA
atgaacaaccaacggaaaaagacgggaaaaccgtctatcaatatgctgaaacgcgtgagaaaccgtgtgtcaactggaagccagctggccaagcggttcagcaagggcctgctgaacggacagggacccatgaagctggtcatggccttcatcgcctttctgaggttcctggccatcccacctaccgcaggcgtgctggccagatggggcaccttcaagaagagcggcgccatcaaggtgctgaagggcttcaagcgggagatctctaacatgctgagcatcatcaataagagaaagaagacctctctgtgcctgatgatgatcctgccagccgccctggcctttcacctgacaagcagggacggcgagcctcgcatgatcgtgggcaagaacgagcggggcaagtccctgctgttcaagacagcctctggcatcaatatgtgcaccctgatcgccatggatctgggcgagatgtgcgacgataccgtgacatacaagtgtcctcacatcaccgaggtggagccagaggatatcgactgctggtgtaacctgacctctacatgggtgacctatggcacatgcaatcaggccggcgagcaccggagagacaagaggagcgtggccctggcccctcacgtgggcatgggcctggatacccgcacacagacctggatgtccgccgagggagcatggaggcaggtggagaaggtggagacatgggccctgagacaccccggctttacaatcctggccctgttcctggcccactacatcggcacctccctgacacagaaggtggtcatcttcatcctgctgatgctggtgacaccttctatgaccatgagatgcgtgggagtgggaaacagggacttcgtggagggcctgagcggagcaacctgggtggatgtggtgctggagcacggaggatgcgtgaccacaatggccaagaataagcccaccctggacatcgagctgcagaagaccgaggccacacagctggccacactgaggaagctgtgcatcgagggcaagatcaccaacatcaccacagatagcaggtgtccaacacagggagaggccgtgctgccagaggagcaggaccagaactacgtgtgcaagcacacgtacgtggatagaggctggggcaatggctgtggcctgtttggcaagggctccctggtgacatgcgccaagttccagtgtctggagctgatcgagggcaaggtggtgcagtacgagaacctgaagtataccgtgatcatcaccgtgcacacaggcgaccagcaccaagtgggcaatgagacacagggagtgaccgcagagatcacaccacaggccagcaccacagaggccatcctgcctgagtacggcaccctgggcctggagtgctccccccggaccggcctggactttaacgagatgatcctgctgaccatgaagaataaggcctggatggtgcaccgccagtggttctttgatctgccactgccatggacctccggagcaaccacagagacaccaacctggaacagaaaggagctgctggtgacattcaagaatgcccacgccaagaagcaggaggtggtggtgctgggcagccaggagggagcaatgcacaccgccctgacaggagccaccgagatccagaacacaggcggcacctccatctttgccggccacctgaagtgcaggctgaagatggacaagctggagctgaagggcatgtcctacgccatgtgcaccaataccttcgtgctgaagaaggaggtgtctgagacacagcacggcacaatcctgatcaaggtggagtataagggcgaggacgccccttgtaagatccccttttccaccgaggatggccagggcaaggcccacaacggcagactgatcaccgccaatcctgtggtgacaaagaaggaggagccagtgaacatcgaggccgagccacccttcggcgagtctaatatcgtgatcggcaccggcgacaacgccctgaagatcaattggtacaagaagggcagctccatcggcaagatgtttgaggcaaccgccaggggcgccaggaggatggccatcctgggcgatacagcatgggacttcggcagcgtgggaggcgtgctgaactccctgggcaagatggtgcaccagatctttggctccgcctataccgccctgttctctggcgtgagctgggtcatgaagatcggcatcggcgtgctgctgacctggatcggcctgaactctaagaatacatctatgagcttctcctgcatcgccatcggcatcatcaccctgtacctgggcgtggtggtgcaggcagacatgggatgcgtgatcaactggaagggcaaggagctgaagtgtggctccggcatctttgtgaccaatgaggtgcacacatggaccgagcagtataagttccaggccgattctcccaagaggctggccacagcaatcgcaggagcatgggagaacggcgtgtgcggcatccggagcaccacaagaatggagaatctgctgtggaagcagatcgccaacgagctgaattacatcctgtgggagaacaatatcaagctgaccgtggtggtgggcgacacaatcggcgtgctggagcagggcaagcgcacactgacccctcagccaatggagctgaagtatagctggaagacctggggcaaggccaagatcgtgacagccgagacacagaactctagcttcatcatcgacggccccaatacacctgagtgcccatctgccagccgggcctggaacgtgtgggaggtggaggattacggctttggcgtgttcaccacaaatatctggctgaagctgagagaggtgtacacccagatgtgcgatcacaggctgatgtccgccgcagtgaaggatgagagggccgtgcacgcagacatgggatactggatcgagtctcagaagaacggcagctggaagctggagaaggcctctctgatcgaggtgaagacatgcacctggcccaagtcccacaccctgtggtctaacggcgtgctggagagcgacatgatcatccctaagagcctggccggcccaatctcccagcacaattaccggcccgggtatcacacacagaccgcaggaccttggcacctgggcaagctggagctggatttcaactattgcgagggcaccacagtggtcatcgccgagaattgtggcaccagaggcccatctctgagaaccacaaccgtgagcggcaagctgatccacgagtggtgctgtaggagctgcacactgcctccactgcgctacatgggcgaggacggctgttggtatggcatggagatcagacccatctccgagaaggaggagaacatggtgaagtccctggtgtctgccggcagcggcaaggtggataacttcaccatgggcgtgctgtgcctggccatcctgtttgaggaagtgatgaggggcaagttcggcaagaagcacatgatcgccggcgtgttctttaccttcgtgctgctgctgagcggacagatcacctggagggacatggcacacacactgatcatgatcggctccaacgcctctgatagaatgggcatgggcgtgacctacctggccctgatcgccaccttcaagatccagccattcctggccctgggcttctttctgaggaagctgacctcccgcgagaacctgctgctgggcgtgggcctggccatggcaacaaccctgcagctgcccgaggacatcgagcagatggccaatggcatcgccctgggcctgatggccctgaagctgatcacccagtttgagatctatcagctgtggacagccctgatctccctgacctgctctaacacaatcttcacactgaccgtggcatggcggacagccaccctgatcctggcaggcgtgagcctgctgcccgtgtgccagtcctctagcatgagaaagaccgactggctgccaatgacagtggcagcaatgggcgtgccccctctgcctctgttcatcttttctctgaaggataccctgaagcggagaagctggcctctgaacgagggcgtgatggcagtgggcctggtgtccatcctggcctcctctctgctgcgcaatgacgtgcctatggcaggaccactggtggcaggaggcctgctgatcgcctgctacgtgatcacaggcacctccgccgatctgacagtggagaaggcagcagacgtgacctgggaggaggaggcagagcagacaggcgtgtctcacaacctgatgatcaccgtggacgatgacggcacaatgcggatcaaggatgacgagacagagaatatcctgacagtgctgctgaagaccgccctgctgatcgtgtctggcatctttccctacagcatccctgccaccctgctggtgtggcacacatggcagaagcagacccagcggagcggcgtgctgtgggacgtgccaagcccaccagagacacagaaggccgagctggaggagggcgtgtatcggatcaagcagcagggcatcctgggcaagacacaagtgggagtgggcgtgcagaaggagggcgtgttccacacaatgtggcacgtgaccagaggcgccgtgctgacccacaacggcaagagactggagcctaattgggctagcgtgaaaaaagatctgatttcatacggaggaggatggagattgagcgcacaatggcaaaagggggaggaggtgcaggttattgccgtagagcctgggaagaacccaaagaactttcaaaccatgccaggcacatttcagactacaacaggggaaataggagcaattgctctggatttcaagcctggaacttcagggtctcctatcataaacagagagggaaaggtagtgggactatatggcaatggagtggttacaaagaatggcggctacgtcagcggaatagcgcaaacaaatgcagaaccagatggaccgacgccagagttggaagaagagatgttcaaaaagcgaaatctaaccataatggatcttcatcctgggtcaggaaagacacggaaataccttccagccattgttagagaggcaatcaagagacgtttaagaactctaattttggcaccgacaagggtggttgcagctgagatggaagaagcattgaaagggctcccaataaggtaccaaacaacagcaacaaaatctgaacacacgggaagagagattgttgatctaatgtgccacgcaacgttcacaatgcgcttgctgtcaccagttagggttccaaactataacttgataataatggatgaagcccatttcacagacccagccagtatagcggccagagggtacatatcaactcgtgttggaatgggagagacagccgcaatttttatgacggcaacgccccctggaacagctgatgcctttcctcagagcaacgctccaattcaagatgaagaaagggacataccagaacgctcatggaattcaggcaatgaatggattaccgactttgccgggaaaacggtgtggtttgtccccagcatcaaagccggaaatgacatagcaaactgcttgcgaaagaacgggaaaaaggtcattcaacttagtaggaagacttttgaaacagaatatcagaagactaaactaaatgattgggacttcgtggtgacaactgacatttcagaaatgggggccaatttcaaagcagacagagtgatcgacccaagaagatgtctaaaaccagtgatcctgacagatggaccagagcgggtgatcctggctggaccaatgccagtcaccgcggcgagtgctgcgcaaaggagagggagagttggcaggaacccacataaagaaaatgaccagtacatattcacgggccagcctctcaacaatgatgaagaccatgctcactggacagaagcaaaaatgttgctggacaacatcaacactccagaaggaatcataccagctctctttgaaccagaaagggagaagtcagccgccatagacggtgaatatcgcctgaaaggtgaatccaggaagactttcgtagaactcatgaagaggggtgaccttccagtttggttagcccacaaagtagcatcagaggggatcaaatatacagatagaaaatggtgctttgatggacagcgcaacaatcaaattttagaggaaaacatggacgtggaaatctggacaaaggaaggagaaaagaaaaaattgagacctaggtggcttgatgcccgcacttattcagatcccttagcactcaaggaattcaaggactttgcggctggtagaaagtctatcgcccttgatcttgtgacagaaataggaagagtgccttcacacctagcccacaggacgagaaacgctctggacaatctggtgatgctgcacacgtcagaacatggcggtagggcctacaggcatgcggtggaggaactaccagaaacaatggaaacactcctactcctgggactcatgatcttactgacaggtggagcgatgcttttcttgatatcaggtaaagggattggaaagacttcaataggactcatttgcgtgattgcttccagcggcatgctgtggatggccgaaattccactccaatggatcgcatcggctatagtcctggagttttttatgatggtgttacttataccagaaccagaaaagcagagaaccccccaagacaaccaactcgcatatgtcgtaataggcatacttacattggctgcaataatagcggccaatgaaatgggactgttggaaactacaaagagagatttaggaatgtccaaggagccaggtgttgtttctccaactagctatttggacgtcgacttgcacccagcatcagcctggacattgtacgccgtggccacgacagtaataacaccaatgttaagacataccatagagaattctacagcaaatgtgtccctggcagctatagccaaccaggcagtggtcctgatgggtttggacaaaggatggccaatatcaaaaatggacttaggcgtaccactactggcattgggttgctattcacaagtgaacccattgactctaacagcggcagtacttttgctaatcacacattatgctattataggtccaggactgcaggcaaaagccactcgtgaagctcaaaaaaggacagctgctggaattatgaagaatccaacggtggatgggataataacaatagatctagatcctgtaatatatgattcaaaatttgaaaagcaactgggacaggtcatgctcctggttttgtgcgcagttcaactgttgctaatgagaacatcatgggccttgtgtgaagctctaactttagctacgggaccaataacaacactctgggaaggatcacctgggaagttttggaataccacgatagctgtttccatggcgaacatttttagagggagctatttagcaggagctgggcttgccttttctatcatgaaatcagttggaacaggaaaaagaggaacaggctctcaaggtgaaactttaggagaaaaatggaaaaagaaattgaatcaattatcccggaaagagtttgacctttacaagaagtctggaatcactgaagtagatagaacagaagccaaagaagggttgaaaagaggagaaacaacacatcatgccgtgtcgagaggtagtgcaaaacttcaatggtttgtggagagaaacatggtcattcccgaaggaagagtcatagacctgggctgtggaagaggaggctggtcatattactgtgcaggactgaaaaaagtcacagaagtgcgagggtacacaaaaggcggtccaggacacgaagaaccagtgcctatgtcaacatatggatggaacatagttaagctaatgagtggaaaagatgttttctatcttccacctgaaaagtgtgacaccctgttgtgtgacattggagaatcttcaccaagcccaacagtggaagaaagcagaactataagagttttgaagatggttgaaccatggctaaaaaacaaccagttttgcattaaagtattgaacccttacatgccagccgtgattgagcacctagaaagactacaaaggaaacacggaggaatgcttgtgagaaatccactttcacgaaactccacgcacgaaatgtactggatatctaatggcacaggcaacattgtctcttcagtcaacatggtatccagattgttactgaacaggttcacgatgacacacaggagacctaccatagagaaagatgtggatttaggagcaggaactcgacatgtcaatgcggaaccagaaacacccaacatggaagtcattggggaaagaataaaaaggatcaaggaggagcataattcaacatggcactatgatgacgaaaacccctacaaaacgtgggcttaccacggatcctatgaagtcaaggccacaggctcagcctcctccatgataaatggagtcgtgaaacttctcactaaaccatgggatgtggtgcccatggtgacacagatggcaatgacagatacaactccattcggccagcagagagtctttaaagagaaagtggacaccaggacacccaggcctatgccagggacaagaaaggttatggagatcacagcggagtggctctggagaaccctggggaggaacaaaagacccaggttgtgcacaagggaagagtttacaaaaaaggtcagaaccaacgcagccatgggcgccgttttcacagaggagaaccaatgggacagtgcgaaagctgctgtagaggatgaagaattttggaaacttgtggatagagaacgtgaactccacaaattaggcaagtgcggaagctgtgtttacaacatgatgggcaagagagagaagaaacttggagagtttggcaaagcgaaaggcagtagggctatatggtacatgtggttgggagccaggtaccttgagttcgaagcccttggattcttgaatgaagaccactggttctcgcgtgaaaactcttacagtggagtagaaggagaaggactgcacaaactaggctacatattaagggacatttccaagatacccggaggagccatgtatgctgatgacacagctggttgggacacaagaataacagaagatgacctgcacaatgaggaaaagattacacagcaaatggaccctgaacacaggctgttagcgaacgctatatttaagctcacataccagaacaaagtggtcaaagttcaacgaccgactccaacgggcacggtaatggacatcatatctaggaaagaccaaagaggcagtggacaggtgggaacttatggtctgaatacatttaccaacatggaagcccagttagtcaggcaaatggaaggagaaggtgtgctgtcaaaggcagacctcgagaaccctcatctgccagaaaagaaaatcacacaatggttggaaaccaaaggagtggagaggttacaaagaatggccattagcggggatgactgcgtggtgaaaccaatcgatgacaggttcgctaacgccctgcttgctctgaacgatatgggaaaggttcggaaagacatacctcaatggcagccatcaaagggatggcatgactggcagcaggttcctttctgctcccaccacttccatgaattgattatgaaagatggaagaaagttggtggttccctgcagaccccaggacgaactaataggaagagcaagaatctctcaaggagcgggatggagtcttagagaaaccgcatgtttggggaaagcctacgcccaaatgtggagtctcatgtattttcacagaagagatctcagactagcgtccaatgccatatgttcagcagtaccagtccactgggtccccacaagcagaacgacatggtctattcatgctcaccatcagtggatgaccacagaagacatgcttactgtttggaacagggtgtggatcgaggacaatccatggatggaagacaaaactccagttacaacctgggagaatgttccatacctagggaagagagaagaccaatggtgcggatcactcattggtctcacttccagagcaacctgggctcagaacatatccacagcaattcaacaggtgagaagccttataggcaatgaagagtttctggactacatgccttcaatgaagagattcagaaaagacgaggagtcggagggagccatttggtaa

SEQ ID NO: 41 - DNA, 10700 bp, synthetic construct
  source 1..10700: mol_type = other DNA
agttgttagtctgcgtggaccgacaagaacagtttcgactcggaagcttgcttaacgtagtgctaacagttttttattagagagcagatctctgatgaacaaccaacggaaaaagacgggaaaaccgtctatcaatatgctgaaacgcgtgagaaaccgtgtgtcaactggaagccagctggccaagcggttcagcaagggcctgctgaacggacagggacccatgaagctggtcatggccttcatcgcctttctgaggttcctggccatcccacctaccgcaggcgtgctggccagatggggcaccttcaagaagagcggcgccatcaaggtgctgaagggcttcaagcgggagatctctaacatgctgagcatcatcaataagagaaagaagacctctctgtgcctgatgatgatcctgccagccgccctggcctttcacctgacaagcagggacggcgagcctcgcatgatcgtgggcaagaacgagcggggcaagtccctgctgttcaagacagcctctggcatcaatatgtgcaccctgatcgccatggatctgggcgagatgtgcgacgataccgtgacatacaagtgtcctcacatcaccgaggtggagccagaggatatcgactgctggtgtaacctgacctctacatgggtgacctatggcacatgcaatcaggccggcgagcaccggagagacaagaggagcgtggccctggcccctcacgtgggcatgggcctggatacccgcacacagacctggatgtccgccgagggagcatggaggcaggtggagaaggtggagacatgggccctgagacaccccggctttacaatcctggccctgttcctggcccactacatcggcacctccctgacacagaaggtggtcatcttcatcctgctgatgctggtgacaccttctatgaccatgagatgcgtgggagtgggaaacagggacttcgtggagggcctgagcggagcaacctgggtggatgtggtgctggagcacggaggatgcgtgaccacaatggccaagaataagcccaccctggacatcgagctgcagaagaccgaggccacacagctggccacactgaggaagctgtgcatcgagggcaagatcaccaacatcaccacagatagcaggtgtccaacacagggagaggccgtgctgccagaggagcaggaccagaactacgtgtgcaagcacacgtacgtggatagaggctggggcaatggctgtggcctgtttggcaagggctccctggtgacatgcgccaagttccagtgtctggagctgatcgagggcaaggtggtgcagtacgagaacctgaagtataccgtgatcatcaccgtgcacacaggcgaccagcaccaagtgggcaatgagacacagggagtgaccgcagagatcacaccacaggccagcaccacagaggccatcctgcctgagtacggcaccctgggcctggagtgctccccccggaccggcctggactttaacgagatgatcctgctgaccatgaagaataaggcctggatggtgcaccgccagtggttctttgatctgccactgccatggacctccggagcaaccacagagacaccaacctggaacagaaaggagctgctggtgacattcaagaatgcccacgccaagaagcaggaggtggtggtgctgggcagccaggagggagcaatgcacaccgccctgacaggagccaccgagatccagaacacaggcggcacctccatctttgccggccacctgaagtgcaggctgaagatggacaagctggagctgaagggcatgtcctacgccatgtgcaccaataccttcgtgctgaagaaggaggtgtctgagacacagcacggcacaatcctgatcaaggtggagtataagggcgaggacgccccttgtaagatccccttttccaccgaggatggccagggcaaggcccacaacggcagactgatcaccgccaatcctgtggtgacaaagaaggaggagccagtgaacatcgaggccgagccacccttcggcgagtctaatatcgtgatcggcaccggcgacaacgccctgaagatcaattggtacaagaagggcagctccatcggcaagatgtttgaggcaaccgccaggggcgccaggaggatggccatcctgggcgatacagcatgggacttcggcagcgtgggaggcgtgctgaactccctgggcaagatggtgcaccagatctttggctccgcctataccgccctgttctctggcgtgagctgggtcatgaagatcggcatcggcgtgctgctgacctggatcggcctgaactctaagaatacatctatgagcttctcctgcatcgccatcggcatcatcaccctgtacctgggcgtggtggtgcaggcagacatgggatgcgtgatcaactggaagggcaaggagctgaagtgtggctccggcatctttgtgaccaatgaggtgcacacatggaccgagcagtataagttccaggccgattctcccaagaggctggccacagcaatcgcaggagcatgggagaacggcgtgtgcggcatccggagcaccacaagaatggagaatctgctgtggaagcagatcgccaacgagctgaattacatcctgtgggagaacaatatcaagctgaccgtggtggtgggcgacacaatcggcgtgctggagcagggcaagcgcacactgacccctcagccaatggagctgaagtatagctggaagacctggggcaaggccaagatcgtgacagccgagacacagaactctagcttcatcatcgacggccccaatacacctgagtgcccatctgccagccgggcctggaacgtgtgggaggtggaggattacggctttggcgtgttcaccacaaatatctggctgaagctgagagaggtgtacacccagatgtgcgatcacaggctgatgtccgccgcagtgaaggatgagagggccgtgcacgcagacatgggatactggatcgagtctcagaagaacggcagctggaagctggagaaggcctctctgatcgaggtgaagacatgcacctggcccaagtcccacaccctgtggtctaacggcgtgctggagagcgacatgatcatccctaagagcctggccggcccaatctcccagcacaattaccggcccgggtatcacacacagaccgcaggaccttggcacctgggcaagctggagctggatttcaactattgcgagggcaccacagtggtcatcgccgagaattgtggcaccagaggcccatctctgagaaccacaaccgtgagcggcaagctgatccacgagtggtgctgtaggagctgcacactgcctccactgcgctacatgggcgaggacggctgttggtatggcatggagatcagacccatctccgagaaggaggagaacatggtgaagtccctggtgtctgccggcagcggcaaggtggataacttcaccatgggcgtgctgtgcctggccatcctgtttgaggaagtgatgaggggcaagttcggcaagaagcacatgatcgccggcgtgttctttaccttcgtgctgctgctgagcggacagatcacctggagggacatggcacacacactgatcatgatcggctccaacgcctctgatagaatgggcatgggcgtgacctacctggccctgatcgccaccttcaagatccagccattcctggccctgggcttctttctgaggaagctgacctcccgcgagaacctgctgctgggcgtgggcctggccatggcaacaaccctgcagctgcccgaggacatcgagcagatggccaatggcatcgccctgggcctgatggccctgaagctgatcacccagtttgagatctatcagctgtggacagccctgatctccctgacctgctctaacacaatcttcacactgaccgtggcatggcggacagccaccctgatcctggcaggcgtgagcctgctgcccgtgtgccagtcctctagcatgagaaagaccgactggctgccaatgacagtggcagcaatgggcgtgccccctctgcctctgttcatcttttctctgaaggataccctgaagcggagaagctggcctctgaacgagggcgtgatggcagtgggcctggtgtccatcctggcctcctctctgctgcgcaatgacgtgcctatggcaggaccactggtggcaggaggcctgctgatcgcctgctacgtgatcacaggcacctccgccgatctgacagtggagaaggcagcagacgtgacctgggaggaggaggcagagcagacaggcgtgtctcacaacctgatgatcaccgtggacgatgacggcacaatgcggatcaaggatgacgagacagagaatatcctgacagtgctgctgaagaccgccctgctgatcgtgtctggcatctttccctacagcatccctgccaccctgctggtgtggcacacatggcagaagcagacccagcggagcggcgtgctgtgggacgtgccaagcccaccagagacacagaaggccgagctggaggagggcgtgtatcggatcaagcagcagggcatcctgggcaagacacaagtgggagtgggcgtgcagaaggagggcgtgttccacacaatgtggcacgtgaccagaggcgccgtgctgacccacaacggcaagagactggagcctaattgggctagcgtgaaaaaagatctgatttcatacggaggaggatggagattgagcgcacaatggcaaaagggggaggaggtgcaggttattgccgtagagcctgggaagaacccaaagaactttcaaaccatgccaggcacatttcagactacaacaggggaaataggagcaattgctctggatttcaagcctggaacttcagggtctcctatcataaacagagagggaaaggtagtgggactatatggcaatggagtggttacaaagaatggcggctacgtcagcggaatagcgcaaacaaatgcagaaccagatggaccgacgccagagttggaagaagagatgttcaaaaagcgaaatctaaccataatggatcttcatcctgggtcaggaaagacacggaaataccttccagccattgttagagaggcaatcaagagacgtttaagaactctaattttggcaccgacaagggtggttgcagctgagatggaagaagcattgaaagggctcccaataaggtaccaaacaacagcaacaaaatctgaacacacgggaagagagattgttgatctaatgtgccacgcaacgttcacaatgcgcttgctgtcaccagttagggttccaaactataacttgataataatggatgaagcccatttcacagacccagccagtatagcggccagagggtacatatcaactcgtgttggaatgggagagacagccgcaatttttatgacggcaacgccccctggaacagctgatgcctttcctcagagcaacgctccaattcaagatgaagaaagggacataccagaacgctcatggaattcaggcaatgaatggattaccgactttgccgggaaaacggtgtggtttgtccccagcatcaaagccggaaatgacatagcaaactgcttgcgaaagaacgggaaaaaggtcattcaacttagtaggaagacttttgaaacagaatatcagaagactaaactaaatgattgggacttcgtggtgacaactgacatttcagaaatgggggccaatttcaaagcagacagagtgatcgacccaagaagatgtctaaaaccagtgatcctgacagatggaccagagcgggtgatcctggctggaccaatgccagtcaccgcggcgagtgctgcgcaaaggagagggagagttggcaggaacccacataaagaaaatgaccagtacatattcacgggccagcctctcaacaatgatgaagaccatgctcactggacagaagcaaaaatgttgctggacaacatcaacactccagaaggaatcataccagctctctttgaaccagaaagggagaagtcagccgccatagacggtgaatatcgcctgaaaggtgaatccaggaagactttcgtagaactcatgaagaggggtgaccttccagtttggttagcccacaaagtagcatcagaggggatcaaatatacagatagaaaatggtgctttgatggacagcgcaacaatcaaattttagaggaaaacatggacgtggaaatctggacaaaggaaggagaaaagaaaaaattgagacctaggtggcttgatgcccgcacttattcagatcccttagcactcaaggaattcaaggactttgcggctggtagaaagtctatcgcccttgatcttgtgacagaaataggaagagtgccttcacacctagcccacaggacgagaaacgctctggacaatctggtgatgctgcacacgtcagaacatggcggtagggcctacaggcatgcggtggaggaactaccagaaacaatggaaacactcctactcctgggactcatgatcttactgacaggtggagcgatgcttttcttgatatcaggtaaagggattggaaagacttcaataggactcatttgcgtgattgcttccagcggcatgctgtggatggccgaaattccactccaatggatcgcatcggctatagtcctggagttttttatgatggtgttacttataccagaaccagaaaagcagagaaccccccaagacaaccaactcgcatatgtcgtaataggcatacttacattggctgcaataatagcggccaatgaaatgggactgttggaaactacaaagagagatttaggaatgtccaaggagccaggtgttgtttctccaactagctatttggacgtcgacttgcacccagcatcagcctggacattgtacgccgtggccacgacagtaataacaccaatgttaagacataccatagagaattctacagcaaatgtgtccctggcagctatagccaaccaggcagtggtcctgatgggtttggacaaaggatggccaatatcaaaaatggacttaggcgtaccactactggcattgggttgctattcacaagtgaacccattgactctaacagcggcagtacttttgctaatcacacattatgctattataggtccaggactgcaggcaaaagccactcgtgaagctcaaaaaaggacagctgctggaattatgaagaatccaacggtggatgggataataacaatagatctagatcctgtaatatatgattcaaaatttgaaaagcaactgggacaggtcatgctcctggttttgtgcgcagttcaactgttgctaatgagaacatcatgggccttgtgtgaagctctaactttagctacgggaccaataacaacactctgggaaggatcacctgggaagttttggaataccacgatagctgtttccatggcgaacatttttagagggagctatttagcaggagctgggcttgccttttctatcatgaaatcagttggaacaggaaaaagaggaacaggctctcaaggtgaaactttaggagaaaaatggaaaaagaaattgaatcaattatcccggaaagagtttgacctttacaagaagtctggaatcactgaagtagatagaacagaagccaaagaagggttgaaaagaggagaaacaacacatcatgccgtgtcgagaggtagtgcaaaacttcaatggtttgtggagagaaacatggtcattcccgaaggaagagtcatagacctgggctgtggaagaggaggctggtcatattactgtgcaggactgaaaaaagtcacagaagtgcgagggtacacaaaaggcggtccaggacacgaagaaccagtgcctatgtcaacatatggatggaacatagttaagctaatgagtggaaaagatgttttctatcttccacctgaaaagtgtgacaccctgttgtgtgacattggagaatcttcaccaagcccaacagtggaagaaagcagaactataagagttttgaagatggttgaaccatggctaaaaaacaaccagttttgcattaaagtattgaacccttacatgccagccgtgattgagcacctagaaagactacaaaggaaacacggaggaatgcttgtgagaaatccactttcacgaaactccacgcacgaaatgtactggatatctaatggcacaggcaacattgtctcttcagtcaacatggtatccagattgttactgaacaggttcacgatgacacacaggagacctaccatagagaaagatgtggatttaggagcaggaactcgacatgtcaatgcggaaccagaaacacccaacatggaagtcattggggaaagaataaaaaggatcaaggaggagcataattcaacatggcactatgatgacgaaaacccctacaaaacgtgggcttaccacggatcctatgaagtcaaggccacaggctcagcctcctccatgataaatggagtcgtgaaacttctcactaaaccatgggatgtggtgcccatggtgacacagatggcaatgacagatacaactccattcggccagcagagagtctttaaagagaaagtggacaccaggacacccaggcctatgccagggacaagaaaggttatggagatcacagcggagtggctctggagaaccctggggaggaacaaaagacccaggttgtgcacaagggaagagtttacaaaaaaggtcagaaccaacgcagccatgggcgccgttttcacagaggagaaccaatgggacagtgcgaaagctgctgtagaggatgaagaattttggaaacttgtggatagagaacgtgaactccacaaattaggcaagtgcggaagctgtgtttacaacatgatgggcaagagagagaagaaacttggagagtttggcaaagcgaaaggcagtagggctatatggtacatgtggttgggagccaggtaccttgagttcgaagcccttggattcttgaatgaagaccactggttctcgcgtgaaaactcttacagtggagtagaaggagaaggactgcacaaactaggctacatattaagggacatttccaagatacccggaggagccatgtatgctgatgacacagctggttgggacacaagaataacagaagatgacctgcacaatgaggaaaagattacacagcaaatggaccctgaacacaggctgttagcgaacgctatatttaagctcacataccagaacaaagtggtcaaagttcaacgaccgactccaacgggcacggtaatggacatcatatctaggaaagaccaaagaggcagtggacaggtgggaacttatggtctgaatacatttaccaacatggaagcccagttagtcaggcaaatggaaggagaaggtgtgctgtcaaaggcagacctcgagaaccctcatctgccagaaaagaaaatcacacaatggttggaaaccaaaggagtggagaggttacaaagaatggccattagcggggatgactgcgtggtgaaaccaatcgatgacaggttcgctaacgccctgcttgctctgaacgatatgggaaaggttcggaaagacatacctcaatggcagccatcaaagggatggcatgactggcagcaggttcctttctgctcccaccacttccatgaattgattatgaaagatggaagaaagttggtggttccctgcagaccccaggacgaactaataggaagagcaagaatctctcaaggagcgggatggagtcttagagaaaccgcatgtttggggaaagcctacgcccaaatgtggagtctcatgtattttcacagaagagatctcagactagcgtccaatgccatatgttcagcagtaccagtccactgggtccccacaagcagaacgacatggtctattcatgctcaccatcagtggatgaccacagaagacatgcttactgtttggaacagggtgtggatcgaggacaatccatggatggaagacaaaactccagttacaacctgggagaatgttccatacctagggaagagagaagaccaatggtgcggatcactcattggtctcacttccagagcaacctgggctcagaacatatccacagcaattcaacaggtgagaagccttataggcaatgaagagtttctggactacatgccttcaatgaagagattcagaaaagacgaggagtcggagggagccatttggtaaacgcaggaagaggctaattgtcaggccaccttaagccacagtacggaagaagctgtgctgcctgtgagccccgtctaaggacgttaaaagaagaagtcaggccctaaagccacggtttgagcaaaccgtgctgcctgtagctccgtcgtggggacgtaaaaacctgggaggctgcaaactgtggaagctgtacgcacggtgtagcagactagcggttagaggagacccctcccatgacacaacgcagcagcggggcccgagcactgagtgaagctgtacctccttgcaaaggactagaggttagaggagaccccccgcaaacaaaaacagcatattgacgctgggagagaccagagatcctgctgtctcctcagcatcattccaggcacagaacgccagaaaatggaatggtgctgttgaatcaacaggttct

SEQ ID NO: 42 - DNA, 10173 bp, synthetic construct; identical to SEQ ID NO: 40
  source 1..10173: mol_type = other DNA

SEQ ID NO: 43 - DNA, 10700 bp, synthetic construct
  source 1..10700: mol_type = other DNA
agttgttagtctgcgtggaccgacaagaacagtttcgactcggaagcttgcttaacgtagtgctaacagttttttattagagagcagatctctgatgaacaaccaacggaaaaagacgggaaaaccgtctatcaatatgctgaaacgcgtgagaaaccgtgtgtcaactggaagccagctggccaagcggttcagcaagggcctgctgaacggacagggacccatgaagctggtcatggccttcatcgcctttctgaggttcctggccatcccacctaccgcaggcgtgctggccagatggggcaccttcaagaagagcggcgccatcaaggtgctgaagggcttcaagcgggagatctctaacatgctgagcatcatcaataagagaaagaagacctctctgtgcctgatgatgatcctgccagccgccctggcctttcacctgacaagcagggacggcgagcctcgcatgatcgtgggcaagaacgagcggggcaagtccctgctgttcaagacagcctctggcatcaatatgtgcaccctgatcgccatggatctgggcgagatgtgcgacgataccgtgacatacaagtgtcctcacatcaccgaggtggagccagaggatatcgactgctggtgtaacctgacctctacatgggtgacctatggcacatgcaatcaggccggcgagcaccggagagacaagaggagcgtggccctggcccctcacgtgggcatgggcctggatacccgcacacagacctggatgtccgccgagggagcatggaggcaggtggagaaggtggagacatgggccctgagacaccccggctttacaatcctggccctgttcctggcccactacatcggcacctccctgacacagaaggtggtcatcttcatcctgctgatgctggtgacaccttctatgaccatgagatgcgtgggagtgggaaacagggacttcgtggagggcctgagcggagcaacctgggtggatgtggtgctggagcacggaggatgcgtgaccacaatggccaagaataagcccaccctggacatcgagctgcagaagaccgaggccacacagctggccacactgaggaagctgtgcatcgagggcaagatcaccaacatcaccacagatagcaggtgtccaacacagggagaggccgtgctgccagaggagcaggaccagaactacgtgtgcaagcacacgtacgtggatagaggctggggcaatggctgtggcctgtttggcaagggctccctggtgacatgcgccaagttccagtgtctggagctgatcgagggcaaggtggtgcagtacgagaacctgaagtataccgtgatcatcaccgtgcacacaggcgaccagcaccaagtgggcaatgagacacagggagtgaccgcagagatcacaccacaggccagcaccacagaggccatcctgcctgagtacggcaccctgggcctggagtgctccccccggaccggcctggactttaacgagatgatcctgctgaccatgaagaataaggcctggatggtgcaccgccagtggttctttgatctgccactgccatggacctccggagcaaccacagagacaccaacctggaacagaaaggagctgctggtgacattcaagaatgcccacgccaagaagcaggaggtggtggtgctgggcagccaggagggagcaatgcacaccgccctgacaggagccaccgagatccagaacacaggcggcacctccatctttgccggccacctgaagtgcaggctgaagatggacaagctggagctgaagggcatgtcctacgccatgtgcaccaataccttcgtgctgaagaaggaggtgtctgagacacagcacggcacaatcctgatcaaggtggagtataagggcgaggacgccccttgtaagatccccttttccaccgaggatggccagggcaaggcccacaacggcagactgatcaccgccaatcctgtggtgacaaagaaggaggagccagtgaacatcgaggccgagccacccttcggcgagtctaatatcgtgatcggcaccggcgacaacgccctgaagatcaattggtacaagaagggcagctccatcggcaagatgtttgaggcaaccgccaggggcgccaggaggatggccatcctgggcgatacagcatgggacttcggcagcgtgggaggcgtgctgaactccctgggcaagatggtgcaccagatctttggctccgcctataccgccctgttctctggcgtgagctgggtcatgaagatcggcatcggcgtgctgctgacctggatcggcctgaactctaagaatacatctatgagcttctcctgcatcgccatcggcatcatcaccctgtacctgggcgtggtggtgcaggcagacatgggatgcgtgatcaactggaagggcaaggagctgaagtgtggctccggcatctttgtgaccaatgaggtgcacacatggaccgagcagtataagttccaggccgattctcccaagaggctggccacagcaatcgcaggagcatgggagaacggcgtgtgcggcatccggagcaccacaagaatggagaatctgctgtggaagcagatcgccaacgagctgaattacatcctgtgggagaacaatatcaagctgaccgtggtggtgggcgacacaatcggcgtgctggagcagggcaagcgcacactgacccctcagccaatggagctgaagtatagctggaagacctggggcaaggccaagatcgtgacagccgagacacagaactctagcttcatcatcgacggccccaatacacctgagtgcccatctgccagccgggcctggaacgtgtgggaggtggaggattacggctttggcgtgttcaccacaaatatctggctgaagctgagagaggtgtacacccagatgtgcgatcacaggctgatgtccgccgcagtgaaggatgagagggccgtgcacgcagacatgggatactggatcgagtctcagaagaacggcagctggaagctggagaaggcctctctgatcgaggtgaagacatgcacctggcccaagtcccacaccctgtggtctaacggcgtgctggagagcgacatgatcatccctaagagcctggccggcccaatctcccagcacaattaccggcccgggtatcacacacagaccgcaggaccttggcacctgggcaagctggagctggatttcaactattgcgagggcaccacagtggtcatcgccgagaattgtggcaccagaggcccatctctgagaaccacaaccgtgagcggcaagctgatccacgagtggtgctgtaggagctgcacactgcctccactgcgctacatgggcgaggacggctgttggtatggcatggagatcagacccatctccgagaaggaggagaacatggtgaagtccctggtgtctgccggcagcggcaaggtggataacttcaccatgggcgtgctgtgcctggccatcctgtttgaggaagtgatgaggggcaagttcggcaagaagcacatgatcgccggcgtgttctttaccttcgtgctgctgctgagcggacagatcacctggagggacatggcacacacactgatcatgatcggctccaacgcctctgatagaatgggcatgggcgtgacctacctggccctgatcgccaccttcaagatccagccattcctggccctgggcttctttctgaggaagctgacctcccgcgagaacctgctgctgggcgtgggcctggccatggcaacaaccctgcagctgcccgaggacatcgagcagatggccaatggcatcgccctgggcctgatggccctgaagctgatcacccagtttgagatctatcagctgtggacagccctgatctccctgacctgctctaacacaatcttcacactgaccgtggcatggcggacagccaccctgatcctggcaggcgtgagcctgctgcccgtgtgccagtcctctagcatgagaaagaccgactggctgccaatgacagtggcagcaatgggcgtgccccctctgcctctgttcatcttttctctgaaggataccctgaagcggagaagctggcctctgaacgagggcgtgatggcagtgggcctggtgtccatcctggcctcctctctgctgcgcaatgacgtgcctatggcaggaccactggtggcaggaggcctgctgatcgcctgctacgtgatcacaggcacctccgccgatctgacagtggagaaggcagcagacgtgacctgggaggaggaggcagagcagacaggcgtgtctcacaacctgatgatcaccgtggacgatgacggcacaatgcggatcaaggatgacgagacagagaatatcctgacagtgctgctgaagaccgccctgctgatcgtgtctggcatctttccctacagcatccctgccaccctgctggtgtggcacacatggcagaagcagacccagcggagcggcgtgctgtgggacgtgccaagcccaccagagacacagaaggccgagctggaggagggcgtgtatcggatcaagcagcagggcatcctgggcaagacacaagtgggagtgggcgtgcagaaggagggcgtgttccacacaatgtggcacgtgaccagaggcgccgtgctgacccacaacggcaagagactggagcctaattgggctagcgtgaagaaggacctgatctcttacggcggaggatggagactgagcgcccagtggcagaagggagaggaggtgcaggtcatcgccgtggagccaggcaagaaccccaagaattttcagaccatgccaggcacattccagacaaccacaggagagatcggagcaatcgccctggacttcaagcccggcacctccggctctcctatcatcaacagagagggcaaggtggtgggcctgtacggcaacggcgtggtgacaaagaatggaggatacgtgagcggaatcgcacagaccaacgcagagcctgacggaccaacacctgagctggaggaggagatgttcaagaagaggaatctgaccatcatggatctgcacccaggcagcggcaagacacggaagtacctgcccgccatcgtgagagaggccatcaagaggcgcctgaggaccctgatcctggcaccaaccagagtggtggcagcagagatggaggaggccctgaagggcctgccaatccggtatcagaccacagccacaaagtctgagcacaccggcagagagatcgtggacctgatgtgccacgccaccttcaccatgcggctgctgagccctgtgagagtgccaaactacaatctgatcatcatggatgaggcacacttcaccgaccccgcctccatcgcagccaggggctatatctctacccgcgtgggaatgggagagacagcagcaatctttatgacagcaacccctccaggcaccgcagatgccttcccacagagcaacgcccccatccaggatgaggagcgggacatcccagagagaagctggaactccggcaatgagtggatcaccgactttgccggcaagacagtgtggttcgtgccctccatcaaggccggcaacgatatcgccaattgcctgaggaagaatggcaagaaagtgatccagctgtctcgcaagaccttcgagacagagtaccagaagaccaagctgaacgattgggactttgtggtgaccacagacatctccgagatgggcgccaatttcaaggccgatagagtgatcgacccacggagatgtctgaagcccgtgatcctgaccgatggcccagagagagtgatcctggccggcccaatgcccgtgacagcagccagcgccgcacagaggcgcggcagggtgggccgcaaccctcacaaggagaatgaccagtatatcttcaccggccagccactgaacaatgatgaggaccacgcccactggaccgaggccaagatgctgctggataacatcaatacacctgagggcatcatcccagccctgtttgagcccgagagagagaagtctgccgccatcgacggcgagtaccggctgaagggcgagagcagaaagaccttcgtggagctgatgaagaggggcgatctgcccgtgtggctggcccacaaggtggcctccgagggcatcaagtataccgatcggaagtggtgctttgacggccagagaaacaatcagatcctggaggagaacatggacgtggagatctggaccaaggagggcgagaagaagaagctgcggcctagatggctggatgccaggacatacagcgacccactggccctgaaggagtttaaggacttcgcagcaggaaggaagagcatcgccctggatctggtgaccgagatcggccgcgtgccctcccacctggcacacaggacccgcaacgccctggataacctggtcatgctgcacacatccgagcacggcggcagagcctatagacacgccgtggaggagctgcctgagacaatggagacactgctgctgctgggcctgatgatcctgctgaccggaggagccatgctgttcctgatcagcggcaagggcatcggcaagacatccatcggcctgatctgcgtgatcgccagctccggcatgctgtggatggccgagatccctctgcagtggatcgccagcgccatcgtgctggagttctttatgatggtgctgctgatccctgagccagagaagcagcgcaccccacaggacaaccagctggcctacgtggtcatcggcatcctgacactggccgccatcatcgccgccaatgagatgggcctgctggagacaacaaagcgggatctgggcatgtctaaggagcctggcgtggtgtctccaaccagctacctggacgtcgacctgcaccctgccagcgcctggaccctgtatgcagtggcaaccacagtgatcacaccaatgctgagacacacaatcgagaacagcaccgcaaacgtgagcctggccgcaatcgcaaaccaggcagtggtgctgatgggcctggacaagggctggccaatcagcaagatggatctgggcgtgcccctgctggccctgggctgctactcccaagtgaatccactgacactgaccgcagccgtgctgctgctgatcacccactatgccatcatcggccctggcctgcaggcaaaggcaaccagggaggcacagaagcgcacagcagcaggcatcatgaagaacccaaccgtggacggcatcatcacaatcgatctggaccccgtgatctacgatagcaagtttgagaagcagctgggccaggtcatgctgctggtgctgtgcgccgtgcagctgctgctgatgaggacctcctgggcactgtgcgaggccctgacactggccaccggacctatcaccacactgtgggagggctctccaggcaagttctggaacaccacaatcgccgtgtctatggccaatatctttcggggcagctacctggcaggagcaggcctggccttcagcatcatgaagtccgtgggcacaggcaagagaggcaccggcagccagggagagacactgggcgagaagtggaagaagaagctgaaccagctgtccaggaaggagtttgacctgtataagaagtctggcatcacagaggtggatcgcaccgaggcaaaggagggcctgaagagaggagagacaacacaccacgccgtgtcccgcggctctgccaagctgcagtggttcgtggagaggaatatggtcatcccagagggccgcgtgatcgacctgggctgcggccggggaggatggtcctactattgtgccggcctgaagaaggtgaccgaggtgcggggatacacaaagggaggccctggccacgaggagcccgtgcctatgagcacctacggctggaacatcgtgaagctgatgtccggcaaggacgtgttctacctgccccctgagaagtgcgatacactgctgtgcgacatcggcgagtctagcccatcccccaccgtggaggagtctaggacaatccgcgtgctgaagatggtggagccttggctgaagaacaatcagttctgcatcaaggtgctgaatccctacatgcctgccgtgatcgagcacctggagcggctgcagagaaagcacggcggcatgctggtgcggaacccactgagcagaaattccacccacgagatgtattggatctctaacggcacaggcaatatcgtgtcctctgtgaacatggtgagcaggctgctgctgaatcgcttcacaatgacccacagacggcccaccatcgagaaggatgtggacctgggcgcaggcacccgccacgtgaacgccgagccagagacacccaatatggaagtgatcggcgagaggatcaagcgcatcaaggaggagcacaacagcacctggcactacgatgacgagaatccttataagacatgggcctaccacggatcctatgaggtgaaggccaccggctctgccagctccatgatcaacggcgtggtgaagctgctgacaaagccctgggacgtggtgcctatggtgacacagatggccatgaccgataccacaccatttggccagcagagggtgttcaaggagaaggtggacacacggacccctagaccaatgcccggcacccgcaaagtgatggagatcacagcagagtggctgtggaggaccctgggcaggaacaagcggcccagactgtgcacaagagaggagtttaccaagaaggtgaggacaaacgcagcaatgggagccgtgttcaccgaggagaatcagtgggattccgccaaggcagcagtggaggacgaggagttctggaagctggtggatagggagcgcgagctgcacaagctgggcaagtgcggcagctgcgtgtataacatgatgggcaagagagagaagaagctgggcgagtttggcaaggccaagggctccagggccatctggtacatgtggctgggcgcccgctatctggagtttgaggccctgggcttcctgaacgaggaccactggttctctcgggagaatagctactccggagtggagggagagggcctgcacaagctgggctatatcctgagagacatcagcaagatccctggcggcgccatgtatgccgatgacaccgccggctgggatacaagaatcaccgaggatgacctgcacaacgaggagaagatcacccagcagatggaccccgagcacaggctgctggccaacgccatctttaagctgacataccagaataaggtggtgaaggtgcagcgccctacaccaaccggcacagtgatggatatcatcagcaggaaggaccagagaggctccggacaagtgggcacctatggcctgaacaccttcacaaatatggaggcccagctggtgaggcagatggagggagagggcgtgctgagcaaggcagacctggagaatcctcacctgccagagaagaagatcacccagtggctggagacaaagggcgtggagaggctgcagcgcatggccatctccggcgatgactgcgtggtgaagcccatcgatgacaggtttgccaacgccctgctggccctgaatgatatgggcaaggtgagaaaggacatcccccagtggcagccttccaagggctggcacgactggcagcaggtgcctttttgctctcaccacttccacgagctgatcatgaaggacggccggaagctggtggtgccctgtagacctcaggatgagctgatcggacgggccagaatcagccagggagcaggatggtccctgcgggagacagcatgcctgggcaaggcctacgcccagatgtggagcctgatgtatttccacaggcgcgatctgaggctggcctctaacgccatctgtagcgccgtgccagtgcactgggtgcccacctcccgcaccacatggtctatccacgcccaccaccagtggatgaccacagaggacatgctgaccgtgtggaaccgcgtgtggatcgaggataatccctggatggaggacaagacacctgtgaccacatgggagaatgtgccctacctgggcaagcgggaggatcagtggtgtggctctctgatcggcctgaccagcagagccacatgggcccagaacatcagcaccgccatccagcaggtgcggtccctgatcggcaatgaggagttcctggactacatgccaagtatgaaacgattccgcaaagacgaggagagtgagggggctatctggtaaacgcaggaagaggctaattgtcaggccaccttaagccacagtacggaagaagctgtgctgcctgtgagccccgtctaaggacgttaaaagaagaagtcaggccctaaagccacggtttgagcaaaccgtgctgcctgtagctccgtcgtggggacgtaaaaacctgggaggctgcaaactgtggaagctgtacgcacggtgtagcagactagcggttagaggagacccctcccatgacacaacgcagcagcggggcccgagcactgagtgaagctgtacctccttgcaaaggactagaggttagaggagaccccccgcaaacaaaaacagcatattgacgctgggagagaccagagatcctgctgtctcctcagcatcattccaggcacagaacgccagaaaatggaatggtgctgttgaatcaacaggttct

SEQ ID NO: 44 - DNA, 10173 bp, synthetic construct
  source 1..10173: mol_type = other DNA
atgaacaaccaacggaaaaagacgggaaaaccgtctatcaatatgctgaaacgcgtgagaaaccgtgtgtcaactggaagccagctggccaagcggttcagcaagggcctgctgaacggacagggacccatgaagctggtcatggccttcatcgcctttctgaggttcctggccatcccacctaccgcaggcgtgctggccagatggggcaccttcaagaagagcggcgccatcaaggtgctgaagggcttcaagcgggagatctctaacatgctgagcatcatcaataagagaaagaagacctctctgtgcctgatgatgatcctgccagccgccctggcctttcacctgacaagcagggacggcgagcctcgcatgatcgtgggcaagaacgagcggggcaagtccctgctgttcaagacagcctctggcatcaatatgtgcaccctgatcgccatggatctgggcgagatgtgcgacgataccgtgacatacaagtgtcctcacatcaccgaggtggagccagaggatatcgactgctggtgtaacctgacctctacatgggtgacctatggcacatgcaatcaggccggcgagcaccggagagacaagaggagcgtggccctggcccctcacgtgggcatgggcctggatacccgcacacagacctggatgtccgccgagggagcatggaggcaggtggagaaggtggagacatgggccctgagacaccccggctttacaatcctggccctgttcctggcccactacatcggcacctccctgacacagaaggtggtcatcttcatcctgctgatgctggtgacaccttctatgaccatgagatgcgtgggagtgggaaacagggacttcgtggagggcctgagcggagcaacctgggtggatgtggtgctggagcacggaggatgcgtgaccacaatggccaagaataagcccaccctggacatcgagctgcagaagaccgaggccacacagctggccacactgaggaagctgtgcatcgagggcaagatcaccaacatcaccacagatagcaggtgtccaacacagggagaggccgtgctgccagaggagcaggaccagaactacgtgtgcaagcacacgtacgtggatagaggctggggcaatggctgtggcctgtttggcaagggctccctggtgacatgcgccaagttccagtgtctggagctgatcgagggcaaggtggtgcagtacgagaacctgaagtataccgtgatcatcaccgtgcacacaggcgaccagcaccaagtgggcaatgagacacagggagtgaccgcagagatcacaccacaggccagcaccacagaggccatcctgcctgagtacggcaccctgggcctggagtgctccccccggaccggcctggactttaacgagatgatcctgctgaccatgaagaataaggcctggatggtgcaccgccagtggttctttgatctgccactgccatggacctccggagcaaccacagagacaccaacctggaacagaaaggagctgctggtgacattcaagaatgcccacgccaagaagcaggaggtggtggtgctgggcagccaggagggagcaatgcacaccgccctgacaggagccaccgagatccagaacacaggcggcacctccatctttgccggccacctgaagtgcaggctgaagatggacaagctggagctgaagggcatgtcctacgccatgtgcaccaataccttcgtgctgaagaaggaggtgtctgagacacagcacggcacaatcctgatcaaggtggagtataagggcgaggacgccccttgtaagatccccttttccaccgaggatggccagggcaaggcccacaacggcagactgatcaccgccaatcctgtggtgacaaagaaggaggagccagtgaacatcgaggccgagccacccttcggcgagtctaatatcgtgatcggcaccggcgacaacgccctgaagatcaattggtacaagaagggcagctccatcggcaagatgtttgaggcaaccgccaggggcgccaggaggatggccatcctgggcgatacagcatgggacttcggcagcgtgggaggcgtgctgaactccctgggcaagatggtgcaccagatctttggctccgcctataccgccctgttctctggcgtgagctgggtcatgaagatcggcatcggcgtgctgctgacctggatcggcctgaactctaagaatacatctatgagcttctcctgcatcgccatcggcatcatcaccctgtacctgggcgtggtggtgcaggcagacatgggatgcgtgatcaactggaagggcaaggagctgaagtgtggctccggcatctttgtgaccaatgaggtgcacacatggaccgagcagtataagttccaggccgattctcccaagaggctggccacagcaatcgcaggagcatgggagaacggcgtgtgcggcatccggagcaccacaagaatggagaatctgctgtggaagcagatcgccaacgagctgaattacatcctgtgggagaacaatatcaagctgaccgtggtggtgggcgacacaatcggcgtgctggagcagggcaagcgcacactgacccctcagccaatggagctgaagtatagctggaagacctggggcaaggccaagatcgtgacagccgagacacagaactctagcttcatcatcgacggccccaatacacctgagtgcccatctgccagccgggcctggaacgtgtgggaggtggaggattacggctttggcgtgttcaccacaaatatctggctgaagctgagagaggtgtacacccagatgtgcgatcacaggctgatgtccgccgcagtgaaggatgagagggccgtgcacgcagacatgggatactggatcgagtctcagaagaacggcagctggaagctggagaaggcctctctgatcgaggtgaagacatgcacctggcccaagtcccacaccctgtggtctaacggcgtgctggagagcgacatgatcatccctaagagcctggccggcccaatctcccagcacaattaccggcccgggtatcacacacagaccgcaggaccttggcacctgggcaagctggagctggatttcaactattgcgagggcaccacagtggtcatcgccgagaattgtggcaccagaggcccatctctgagaaccacaaccgtgagcggcaagctgatccacgagtggtgctgtaggagctgcacactgcctccactgcgctacatgggcgaggacggctgttggtatggcatggagatcagacccatctccgagaaggaggagaacatggtgaagtccctggtgtctgccggcagcggcaaggtggataacttcaccatgggcgtgctgtgcctggccatcctgtttgaggaagtgatgaggggcaagttcggcaagaagcacatgatcgccggcgtgttctttaccttcgtgctgctgctgagcggacagatcacctggagggacatggcacacacactgatcatgatcggctccaacgcctctgatagaatgggcatgggcgtgacctacctggccctgatcgccaccttcaagatccagccattcctggccctgggcttctttctgaggaagctgacctcccgcgagaacctgctgctgggcgtgggcctggccatggcaacaaccctgcagctgcccgaggacatcgagcagatggccaatggcatcgccctgggcctgatggccctgaagctgatcacccagtttgagatctatcagctgtggacagccctgatctccctgacctgctctaacacaatcttcacactgaccgtggcatggcggacagccaccctgatcctggcaggcgtgagcctgctgcccgtgtgccagtcctctagcatgagaaagaccgactggctgccaatgacagtggcagcaatgggcgtgccccctctgcctctgttcatcttttctctgaaggataccctgaagcggagaagctggcctctgaacgagggcgtgatggcagtgggcctggtgtccatcctggcctcctctctgctgcgcaatgacgtgcctatggcaggaccactggtggcaggaggcctgctgatcgcctgctacgtgatcacaggcacctccgccgatctgacagtggagaaggcagcagacgtgacctgggaggaggaggcagagcagacaggcgtgtctcacaacctgatgatcaccgtggacgatgacggcacaatgcggatcaaggatgacgagacagagaatatcctgacagtgctgctgaagaccgccctgctgatcgtgtctggcatctttccctacagcatccctgccaccctgctggtgtggcacacatggcagaagcagacccagcggagcggcgtgctgtgggacgtgccaagcccaccagagacacagaaggccgagctggaggagggcgtgtatcggatcaagcagcagggcatcctgggcaagacacaagtgggagtgggcgtgcagaaggagggcgtgttccacacaatgtggcacgtgaccagaggcgccgtgctgacccacaacggcaagagactggagcctaattgggctagcgtgaagaaggacctgatctcttacggcggaggatggagactgagcgcccagtggcagaagggagaggaggtgcaggtcatcgccgtggagccaggcaagaaccccaagaattttcagaccatgccaggcacattccagacaaccacaggagagatcggagcaatcgccctggacttcaagcccggcacctccggctctcctatcatcaacagagagggcaaggtggtgggcctgtacggcaacggcgtggtgacaaagaatggaggatacgtgagcggaatcgcacagaccaacgcagagcctgacggaccaacacctgagctggaggaggagatgttcaagaagaggaatctgaccatcatggatctgcacccaggcagcggcaagacacggaagtacctgcccgccatcgtgagagaggccatcaagaggcgcctgaggaccctgatcctggcaccaaccagagtggtggcagcagagatggaggaggccctgaagggcctgccaatccggtatcagaccacagccacaaagtctgagcacaccggcagagagatcgtggacctgatgtgccacgccaccttcaccatgcggctgctgagccctgtgagagtgccaaactacaatctgatcatcatggatgaggcacacttcaccgaccccgcctccatcgcagccaggggctatatctctacccgcgtgggaatgggagagacagcagcaatctttatgacagcaacccctccaggcaccgcagatgccttcccacagagcaacgcccccatccaggatgaggagcgggacatcccagagagaagctggaactccggcaatgagtggatcaccgactttgccggcaagacagtgtggttcgtgccctccatcaaggccggcaacgatatcgccaattgcctgaggaagaatggcaagaaagtgatccagctgtctcgcaagaccttcgagacagagtaccagaagaccaagctgaacgattgggactttgtggtgaccacagacatctccgagatgggcgccaatttcaaggccgatagagtgatcgacccacggagatgtctgaagcccgtgatcctgaccgatggcccagagagagtgatcctggccggcccaatgcccgtgacagcagccagcgccgcacagaggcgcggcagggtgggccgcaaccctcacaaggagaatgaccagtatatcttcaccggccagccactgaacaatgatgaggaccacgcccactggaccgaggccaagatgctgctggataacatcaatacacctgagggcatcatcccagccctgtttgagcccgagagagagaagtctgccgccatcgacggcgagtaccggctgaagggcgagagcagaaagaccttcgtggagctgatgaagaggggcgatctgcccgtgtggctggcccacaaggtggcctccgagggcatcaagtataccgatcggaagtggtgctttgacggccagagaaacaatcagatcctggaggagaacatggacgtggagatctggaccaaggagggcgagaagaagaagctgcggcctagatggctggatgccaggacatacagcgacccactggccctgaaggagtttaaggacttcgcagcaggaaggaagagcatcgccctggatctggtgaccgagatcggccgcgtgccctcccacctggcacacaggacccgcaacgccctggataacctggtcatgctgcacacatccgagcacggcggcagagcctatagacacgccgtggaggagctgcctgagacaatggagacactgctgctgctgggcctgatgatcctgctgaccggaggagccatgctgttcctgatcagcggcaagggcatcggcaagacatccatcggcctgatctgcgtgatcgccagctccggcatgctgtggatggccgagatccctctgcagtggatcgccagcgccatcgtgctggagttctttatgatggtgctgctgatccctgagccagagaagcagcgcaccccacaggacaaccagctggcctacgtggtcatcggcatcctgacactggccgccatcatcgccgccaatgagatgggcctgctggagacaacaaagcgggatctgggcatgtctaaggagcctggcgtggtgtctccaaccagctacctggacgtcgacctgcaccctgccagcgcctggaccctgtatgcagtggcaaccacagtgatcacaccaatgctgagacacacaatcgagaacagcaccgcaaacgtgagcctggccgcaatcgcaaaccaggcagtggtgctgatgggcctggacaagggctggccaatcagcaagatggatctgggcgtgcccctgctggccctgggctgctactcccaagtgaatccactgacactgaccgcagccgtgctgctgctgatcacccactatgccatcatcggccctggcctgcaggcaaaggcaaccagggaggcacagaagcgcacagcagcaggcatcatgaagaacccaaccgtggacggcatcatcacaatcgatctggaccccgtgatctacgatagcaagtttgagaagcagctgggccaggtcatgctgctggtgctgtgcgccgtgcagctgctgctgatgaggacctcctgggcactgtgcgaggccctgacactggccaccggacctatcaccacactgtgggagggctctccaggcaagttctggaacaccacaatcgccgtgtctatggccaatatctttcggggcagctacctggcaggagcaggcctggccttcagcatcatgaagtccgtgggcacaggcaagagaggcaccggcagccagggagagacactgggcgagaagtggaagaagaagctgaaccagctgtccaggaaggagtttgacctgtataagaagtctggcatcacagaggtggatcgcaccgaggcaaaggagggcctgaagagaggagagacaacacaccacgccgtgtcccgcggctctgccaagctgcagtggttcgtggagaggaatatggtcatcccagagggccgcgtgatcgacctgggctgcggccggggaggatggtcctactattgtgccggcctgaagaaggtgaccgaggtgcggggatacacaaagggaggccctggccacgaggagcccgtgcctatgagcacctacggctggaacatcgtgaagctgatgtccggcaaggacgtgttctacctgccccctgagaagtgcgatacactgctgtgcgacatcggcgagtctagcccatcccccaccgtggaggagtctaggacaatccgcgtgctgaagatggtggagccttggctgaagaacaatcagttctgcatcaaggtgctgaatccctacatgcctgccgtgatcgagcacctggagcggctgcagagaaagcacggcggcatgctggtgcggaacccactgagcagaaattccacccacgagatgtattggatctctaacggcacaggcaatatcgtgtcctctgtgaacatggtgagcaggctgctgctgaatcgcttcacaatgacccacagacggcccaccatcgagaaggatgtggacctgggcgcaggcacccgccacgtgaacgccgagccagagacacccaatatggaagtgatcggcgagaggatcaagcgcatcaaggaggagcacaacagcacctggcactacgatgacgagaatccttataagacatgggcctaccacggatcctatgaggtgaaggccaccggctctgccagctccatgatcaacggcgtggtgaagctgctgacaaagccctgggacgtggtgcctatggtgacacagatggccatgaccgataccacaccatttggccagcagagggtgttcaaggagaaggtggacacacggacccctagaccaatgcccggcacccgcaaagtgatggagatcacagcagagtggctgtggaggaccctgggcaggaacaagcggcccagactgtgcacaagagaggagtttaccaagaaggtgaggacaaacgcagcaatgggagccgtgttcaccgaggagaatcagtgggattccgccaaggcagcagtggaggacgaggagttctggaagctggtggatagggagcgcgagctgcacaagctgggcaagtgcggcagctgcgtgtataacatgatgggcaagagagagaagaagctgggcgagtttggcaaggccaagggctccagggccatctggtacatgtggctgggcgcccgctatctggagtttgaggccctgggcttcctgaacgaggaccactggttctctcgggagaatagctactccggagtggagggagagggcctgcacaagctgggctatatcctgagagacatcagcaagatccctggcggcgccatgtatgccgatgacaccgccggctgggatacaagaatcaccgaggatgacctgcacaacgaggagaagatcacccagcagatggaccccgagcacaggctgctggccaacgccatctttaagctgacataccagaataaggtggtgaaggtgcagcgccctacaccaaccggcacagtgatggatatcatcagcaggaaggaccagagaggctccggacaagtgggcacctatggcctgaacaccttcacaaatatggaggcccagctggtgaggcagatggagggagagggcgtgctgagcaaggcagacctggagaatcctcacctgccagagaagaagatcacccagtggctggagacaaagggcgtggagaggctgcagcgcatggccatctccggcgatgactgcgtggtgaagcccatcgatgacaggtttgccaacgccctgctggccctgaatgatatgggcaaggtgagaaaggacatcccccagtggcagccttccaagggctggcacgactggcagcaggtgcctttttgctctcaccacttccacgagctgatcatgaaggacggccggaagctggtggtgccctgtagacctcaggatgagctgatcggacgggccagaatcagccagggagcaggatggtccctgcgggagacagcatgcctgggcaaggcctacgcccagatgtggagcctgatgtatttccacaggcgcgatctgaggctggcctctaacgccatctgtagcgccgtgccagtgcactgggtgcccacctcccgcaccacatggtctatccacgcccaccaccagtggatgaccacagaggacatgctgaccgtgtggaaccgcgtgtggatcgaggataatccctggatggaggacaagacacctgtgaccacatgggagaatgtgccctacctgggcaagcgggaggatcagtggtgtggctctctgatcggcctgaccagcagagccacatgggcccagaacatcagcaccgccatccagcaggtgcggtccctgatcggcaatgaggagttcctggactacatgccaagtatgaaacgattccgcaaagacgaggagagtgagggggctatctggtaa

SEQ ID NO: 45 - RNA, 24 nt, synthetic construct
  source 1..24: mol_type = other RNA
tcgcgcttgaaaaaacaagcgcga

SEQ ID NO: 46 - RNA, 24 nt, synthetic construct
  source 1..24: mol_type = other RNA
tcgagactcaaaaaacaagcgcga

SEQ ID NO: 47 - protein, 8 aa, synthetic construct
SRLKKNAR

SEQ ID NO: 48 - RNA, 51 nt, synthetic construct
  source 1..51: mol_type = other RNA
acgcgagagaaaccgcgtgtcgactgtgcaacagctgacaaagagattctc

SEQ ID NO: 49 - RNA, 51 nt, synthetic construct
  source 1..51: mol_type = other RNA
acgcgagagaaaccgcgtgtcgactgtgcagcagctgacaaagagattcag

SEQ ID NO: 50 - RNA, 51 nt, synthetic construct
  source 1..51: mol_type = other RNA
acgcgagagaaaccgcgtgtcgactgcgcagcagctgacaaagagattcag

SEQ ID NO: 51 - RNA, 51 nt, synthetic construct
  source 1..51: mol_type = other RNA
acgcgagagaaaccgcgtgtcgactgtgcagcagttgacaaagagtttcag

SEQ ID NO: 52 - RNA, 51 nt, synthetic construct
  source 1..51: mol_type = other RNA
acgcgcgagaaaccgcgtgtcaactgtttcacagttggcgaagagattctc

SEQ ID NO: 53 - RNA, 51 nt, synthetic construct
  source 1..51: mol_type = other RNA
acgcgcgagaaaccgcgtgtcaactgtgagccagctggccaagcggttctc

SEQ ID NO: 54 - RNA, 51 nt, synthetic construct
  source 1..51: mol_type = other RNA
acgcgtgagaaaccgtgtgtcaactggatcacagttggcgaagagattctc

SEQ ID NO: 55 - RNA, 51 nt, synthetic construct
  source 1..51: mol_type = other RNA
acgcgtgagaaaccgtgtgtcaactggctcacagctggccaagcggttctc

SEQ ID NO: 56 - RNA, 51 nt, synthetic construct
  source 1..51: mol_type = other RNA
acgcgagagaaaccgcgtatcaacccctcaagggttggtgaagagattctc

SEQ ID NO: 57 - RNA, 51 nt, synthetic construct
  source 1..51: mol_type = other RNA
acgcgagagaaaccgcgtatcaacccctcaggggctggtcaagaggttctc

SEQ ID NO: 58 - RNA, 46 nt, synthetic construct
  source 1..46: mol_type = other RNA
acgcggaatgccccgcgtgttgtccttgactggactgaagagggca

SEQ ID NO: 59 - RNA, 46 nt, synthetic construct
  source 1..46: mol_type = other RNA
acgcggaatgccccgcgtgttgagtctgaccggactgaagcgggcc

SEQ ID NO: 60 - RNA, 47 nt, synthetic construct
  source 1..47: mol_type = other RNA
acgcggagtagcccgtgtgagcccctttgggggcttgaagaggctgc

SEQ ID NO: 61 - RNA, 47 nt, synthetic construct
  source 1..47: mol_type = other RNA
acgcggagtagcccgtgtgagcccattcgggggactgaagcgcctgc

SEQ ID NO: 62 - RNA, 64 nt, synthetic construct
  source 1..64: mol_type = other RNA
cattttaggtgacacagcctgggattttggatccttgggaggagtgtttacatctataggaaag

SEQ ID NO: 63 - protein, 12 aa, synthetic construct
SFEEGKCGLNSV

SEQ ID NO: 64 - protein, 12 aa, synthetic construct
AHEEGICGIRSV

SEQ ID NO: 65 - protein, 12 aa, synthetic construct
AHKDGVCGIRST

SEQ ID NO: 66 - protein, 12 aa, synthetic construct
AWEEGVCGIRSA

SEQ ID NO: 67 - protein, 12 aa, synthetic construct
AWENGVCGIRST

SEQ ID NO: 68 - protein, 12 aa, synthetic construct
AWEEGICGISSV

SEQ ID NO: 69 - protein, 12 aa, synthetic construct
AHAKGICGLRSV

SEQ ID NO: 70 - protein, 12 aa, synthetic construct
AHKEGVCGVRSV

SEQ ID NO: 71 - protein, 12 aa, synthetic construct
AHKEGVCGLRSV

SEQ ID NO: 72 - RNA, 10723 nt, synthetic construct
  source 1..10723: mol_type = other RNA
agttgttagtctacgtggaccgacaaagacagattctttgagggagctaagctcaacgtagttctaacagttttttaattagagagcagatctctgatgaataaccaacggaaaaaggcgaaaaacacgcctttcaatatgctgaaacgcgagagaaaccgcgtgtcgactgtgcagcagctgacaaagagattcagcctgggaatgctgcagggaaggggaccactgaagctgtttatggccctggtggccttcctgcggtttctgaccatcccccctacagccggcatcctgaagagatggggcaccatcaagaagtccaaggccatcaacgtgctgcgcggctttcggaaggagatcggccggatgctgaatatcctgaaccggagaaggcgctctgccggcatgatcatcatgctgatcccaaccgtgatggccttccacctgaccacacgcaatggcgagccccacatgatcgtgtcccggcaggagaagggcaagtctctgctgtttaagacagaggacggcgtgaacatgtgcaccctgatggctatggacctgggcgagctgtgcgaggataccatcacatacaagtgtcctctgctgagacagaatgagccagaggacatcgattgctggtgtaacagcacctccacatgggtgacctacggcacctgtaccacaatgggcgagcaccggagagagaagcggagcgtggccctggtgccccacgtgggaatgggcctggagaccagaacagagacctggatgagctccgagggagcatggaagcacgtgcagcgcatcgagacatggattctgaggcaccccggcttcaccatgatggcagccatcctggcctacacaatcggcaccacacacttccagcgggccctgatctttatcctgctgacagccgtgacccctagcatgaccatgagatgcatcggcatgtccaatagggacttcgtggagggcgtgtctggaggcagctgggtggacatcgtgctggagcacggctcctgcgtgaccacaatggccaagaacaagcctaccctggactttgagctgatcaagacagaggccaagcagccagccaccctgcggaagtattgcatcgaggccaagctgaccaataccacaaccgagagccggtgtccaacacagggagagcctagcctgaacgaggagcaggacaagcggttcgtgtgcaagcacagcatggtggataggggctggggcaatggctgtggcctgttcggcaagggcggcatcgtgacctgcgccatgtttaggtgtaagaagaatatggagggcaaggtggtgcagcctgagaacctggagtacaccatcgtgatcacaccacactccggagaggagcacgcagtgggaaacgataccggcaagcacggcaaggagatcaagatcacaccacagtctagcatcaccgaggccgagctgacaggctatggcacagtgacaatggagtgcagccccaggaccggcctggacttcaatgagatggtgctgctgcagatggagaacaaggcctggctggtgcaccgccagtggtttctggacctgcctctgccctggctgcctggcgcagatacccagggcagcaattggattcagaaggagacactggtgaccttcaagaacccacacgccaagaagcaggatgtggtggtgctgggctcccaggagggagcaatgcacacagccctgaccggagccacagagatccagatgtcctctggcaacctgctgttcaccggacacctgaagtgccgcctgaggatggacaagctgcagctgaagggcatgtcttacagcatgtgcaccggcaagtttaaggtggtgaaggagatcgccgagacccagcacggcacaatcgtgatcagggtgcagtatgagggcgacggcagcccttgtaagatccccttcgagatcatggatctggagaagaggcacgtgctgggccggctgatcacagtgaatccaatcgtgaccgagaaggactctcccgtgaacatcgaggccgagccaccctttggcgatagctacatcatcatcggcgtggagcctggccagctgaagctgaattggttcaagaagggcagctccatcggccagatgtttgagacaaccatgagaggcgccaagaggatggcaatcctgggcgacaccgcatgggatttcggcagcctgggaggcgtgtttacatccatcggcaaggccctgcaccaggtgttcggagccatctatggcgccgccttttccggcgtgtcttggaccatgaagatcctgatcggcgtgatcatcacatggatcggcatgaactccagatctaccagcctgtccgtgacactggtgctggtgggcatcgtgaccctgtacctgggcgtgatggtgcaggccgattctggctgcgtggtgagctggaagaataaggagctgaagtgtggctccggcatcttcatcacagacaacgtgcacacatggaccgagcagtataagtttcagcctgagtctccaagcaagctggcctctgccatccagaaggcacacgaggagtcaatctgcggcatccgcagcgtgacccggctggagaatctgatgtggaagcagatcacacccgagctgaatcacatcctgtccgagaacgaggtgaagctgaccatcatgacaggcgacatcaagggcatcatgcaggccggcaagagatctctgaggccccagcctacagagctgaagtacagctggaagacctggggcaaggccaagatgctgagcacagagtcccacaaccagaccttcctgatcgatggccccgagacagccgagtgccctaataccaacagggcctggaacagcctggaggtggaggactacggcttcggcgtgtttacaaccaacatctggctgaagctgaaggagaagcaggacgtgttctgtgatagcaagctgatgtccgccgccatcaaggacaatcgcgccgtgcacgccgatatgggctattggatcgagagcgccctgaacgacacctggaagatcgagaaggcctcctttatcgaggtgaagaattgtcactggcctaagtcccacacactgtggtctaacggcgtgctggagtccgagatgatcatcccaaagaatctggccggccccgtgtctcagcacaactaccggcctggctatcacacccagatcacaggcccctggcacctgggcaagctggagatggacttcgatttttgcgacggcacaaccgtggtggtgaccgaggattgtggcaacagaggcccatctctgaggacaaccacagccagcggcaagctgatcacagagtggtgctgtcggagctgcaccctgcctccactgagatacaggggcgaggatggctgttggtatggcatggagatcagacccctgaaggagaaggaggagaatctggtgaacagcctggtgaccgcaggccacggccaggtggacaatttctccctgggcgtgctgggcatggccctgtttctggaggagatgctgcgcaccagagtgggcacaaagcacgccatcctgctggtggccgtgtccttcgtgaccctgatcacaggcaacatgtcttttagagacctgggcagagtgatggtcatggtgggcgccacaatgaccgacgacatcggcatgggagtgacctacctggccctgctggcagccttcaaggtgcgcccaacctttgccgcaggactgctgctgaggaagctgacatccaaggagctgatgatgaccacaatcggcatcgtgctgctgtcccagtctaccatccccgagacaatcctggagctgaccgatgcactggccctgggcatgatggtgctgaagatggtgagaaatatggagaagtatcagctggccgtgaccatcatggccatcctgtgcgtgcccaatgccgtgatcctgcagaacgcctggaaggtgagctgtacaatcctggccgtggtgagcgtgtcccctctgctgctgacatctagccagcagaagaccgactggattcccctggccctgacaatcaagggcctgaaccctaccgccatcttcctgaccacactgtctcgcaccagcaagaagcggagctggcccctgaatgaggccatcatggccgtgggcatggtgtccatcctggcctcctctctgctgaagaacgacatccctatgaccggaccactggtggcaggaggactgctgacagtgtgctacgtgctgaccggcagatccgccgacctggagctggagagggcagcagacgtgaagtgggaggatcaggccgagatctctggcagctcccccatcctgtctatcaccatcagcgaggacggctctatgagcatcaagaacgaggaggaggagcagacactgaccatcctgatcaggaccggcctgctggtcatcagcggcctgttccccgtgtccatccctatcacagctgccgcctggtacctgtgggaggtgaagaagcagagggcaggcgtgctgtgggacgtgccttctccccctccaatgggcaaggccgagctggaggatggcgcctatcgcatcaagcagaagggcatcctgggatacagccagatcggagcaggcgtgtataaggagggcacctttcacacaatgtggcacgtgaccagaggcgccgtgctgatgcacaagggcaagaggatcgagcctagctgggccgacgtgaagaaggatctgatctcctacggcggaggatggaagctggagggagagtggaaggagggagaggaggtgcaggtgctggccctggagccaggcaagaatcccagagccgtgcagaccaagccaggcctgttcaagaccaacgcaggcacaatcggagccgtgtccctggacttttctcctggcacatccggctctccaatcatcgataagaagggcaaggtggtgggcctgtacggaaatggagtggtgacccggagcggagcctacgtgagcgccatcgcccagacagagaagtccatcgaggacaaccccgagatcgaggacgacatcttccggaagaggcgcctgaccatcatggatctgcacccaggcgccggcaagacaaagagatacctgccagcaatcgtgcgggaggccatcaagaggggactgcggacactgatcctggcacctaccagggtggtggcagcagagatggaggaggccctgagaggcctgcccatcaggtatcagacacctgccatcagagccgagcacaccggcagggagatcgtggacctgatgtgccacgccacattcaccatgaggctgctgagccctgtgcgggtgccaaattacaacctgatcatcatggacgaggcccactttaccgatccagcctctatcgccgccagaggctatatcagcacaagggtggagatgggagaggcagcaggaatcttcatgacagcaaccccccctggctcccgcgacccatttccccagtctaatgcccccatcatcgatgaggagcgcgagatccctgagcggtcctggaactctggccacgagtgggtgacagacttcaagggcaagaccgtgtggtttgtgccctccatcaaggccggcaatgacatcgccgcctgcctgagaaagaacggcaagaaagtgatccagctgtctaggaagaccttcgacagcgagtacgtgaagacacgcaccaatgactgggatttcgtggtgaccacagacatcagcgagatgggcgccaactttaaggccgagagagtgatcgacccacggagatgtatgaagcccgtgatcctgaccgatggcgaggagagagtgatcctggccggccctatgccagtgacacactctagcgccgcacagaggcgcggcagaatcggaaggaatcccaagaatgagaacgatcagtacatctatatgggcgagcctctggagaacgacgaggattgcgcccactggaaggaggccaagatgctgctggacaatatcaacaccccagagggcatcatccccagcatgttcgagcctgagagggagaaggtggacgccatcgatggagagtacagactgaggggagaggcaaggaagacatttgtggacctgatgaggagaggcgatctgcccgtgtggctggcatacagggtggcagccgagggcatcaattatgccgacaggcgctggtgtttcgatggcgtgaagaacaatcagatcctggaggagaacgtggaggtggagatctggaccaaggagggcgagaggaagaagctgaagcccagatggctggacgccaggatctactctgatcctctggccctgaaggagttcaaggagtttgcagcaggaaggaagagcctgaccctgaacctgatcacagagatgggccgcctgcctacctttatgacacagaaggccagagacgccctggataatctggccgtgctgcacaccgcagaggcaggcggcagagcatataaccacgccctgtctgagctgccagagaccctggagacactgctgctgctgacactgctggccacagtgaccggcggcatcttcctgtttctgatgagcggcagaggcatcggcaagatgacactgggcatgtgctgtatcatcaccgccagcatcctgctgtggtacgcccagatccagccacactggatcgccgcctccatcatcctggagttctttctgatcgtgctgctgatccccgagcctgagaagcagcggacaccccaggataatcagctgacctacgtggtcatcgccatcctgaccgtggtggccgccacaatggccaacgagatgggcttcctggagaagaccaagaaggacctgggactgggctccatcgcaacacagcagccagagtctaacatcctggacatcgatctgaggccagcaagcgcctggaccctgtacgcagtggccaccacatttgtgacacccatgctgcgccactccatcgagaacagcagcgtgaacgtgtctctgacagccatcgccaatcaggcaaccgtgctgatgggactgggcaagggatggccactgtccaagatggacatcggcgtgcccctgctggcaatcggatgctactctcaggtgaaccccatcacactgaccgccgccctgttcctgctggtggcacactatgccatcatcggccctggcctgcaggccaaggccacccgcgaggcacagaagagggctgccgccggcatcatgaagaatcccaccgtggacggcatcacagtgatcgacctggaccccatcccctacgatcctaagttcgagaagcagctgggccaggtcatgctgctggtgctgtgcgtgacccaggtgctgatgatgaggaccacatgggcactgtgcgaggccctgaccctggcaacaggccctatctccacactgtgggagggcaatccaggcaggttttggaacaccacaatcgccgtgagcatggccaacatcttccgcggctcctacctggcaggagcaggactgctgttttctatcatgaagaataccacaaacacccggagaggcacaggcaatatcggcgagaccctgggcgagaagtggaagtctcggctgaacgccctgggcaagagcgagttccagatctataagaagtccggcatccaggaggtggaccgcaccctggcaaaggagggcatcaagaggggagagacagatcaccacgccgtgagcagaggctccgccaagctgagatggtttgtggagaggaacatggtgacccccgagggcaaggtggtggatctgggatgcggccggggaggctggagctactattgtggaggcctgaagaatgtgagagaggtgaagggactgaccaagggaggccctggccacgaggagcctatcccaatgtccacatacggctggaacctggtgcgcctgcagtctggcgtggacgtgttctttatcccacccgagaagtgcgacaccctgctgtgcgacatcggcgagagctcccccaatcctacagtggaggcaggacgcaccctgcgggtgctgaatctggtggagaactggctgaacaataacacccagttctgcatcaaggtgctgaacccctacatgccttccgtgatcgagaagatggaggccctgcagaggaagtatggcggcgccctggtgcgcaatcctctgtctcggaacagcacccacgagatgtattgggtgtccaatgcctctggcaacatcgtgtctagcgtgaatatgatcagccgcatgctgatcaaccgctttacaatgcggtacaagaaggccacctatgagccagacgtggatctgggcagcggcacccggaatatcggcatcgagtccgagatccccaacctggacatcatcggcaagagaatcgagaagatcaagcaggagcacgagaccagctggcactacgaccaggatcacccatataagacatgggcctaccacggctcttatgagaccaagcagacaggcagcgcctcctctatggtgaacggcgtggtgagactgctgaccaagccctgggacgtggtgcctatggtgacccagatggccatgacagataccacacctttcggccagcagagagtgtttaaggagaaggtggatacaaggacccaggagccaaaggagggcacaaagaagctgatgaagatcaccgccgagtggctgtggaaggagctgggcaagaagaagacccccagaatgtgcacaagggaggagttcaccagaaaggtgaggtccaatgccgccctgggcgccatctttaccgacgagaacaagtggaagtccgccagagaggccgtggaggactctaggttctgggagctggtggataaggagaggaatctgcacctggagggcaagtgcgagacctgcgtgtacaacatgatgggcaagcgcgagaagaagctgggcgagtttggcaaggccaagggcagcagagccatctggtatatgtggctgggcgccaggttcctggagtttgaggccctgggcttcctgaatgaggatcactggtttagccgggagaacagcctgtccggagtggagggagagggactgcacaagctgggctacatcctgagagacgtgtccaagaaggagggcggcgccatgtatgcagacgataccgcaggatgggacaccaggatcacactggaggatctgaagaatgaggagatggtgaccaaccacatggagggcgagcacaagaagctggccgaggccatcttcaagctgacataccagaataaggtggtgcgcgtgcagaggccaacccccaggggcacagtgatggacatcatcagcaggcgcgatcagaggggctccggacaagtgggcacctatggcctgaatacattcaccaacatggaggcccagctgatccggcagatggagggcgagggcgtgtttaagtccatccagcacctgacaatcaccgaggagatcgccgtgcagaactggctggcccgcgtgggaagggagcggctgtctcggatggccatcagcggcgacgattgcgtggtgaagcctctggacgatagattcgccagcgccctgaccgccctgaatgacatgggcaagatccgcaaggacatccagcagtgggagccttctcggggctggaacgattggacacaggtgccattctgcagccaccactttcacgagctgatcatgaaggacggacgcgtgctggtggtgccatgtcggaatcaggatgagctgatcggaagagcaaggatctcccagggagcaggatggtctctgagggagaccgcctgcctgggcaagagctacgcccagatgtggtccctgatgtattttcacaggagagacctgaggctggcagcaaacgccatctgtagcgccgtgccttcccactgggtgccaacctccagaaccacatggtctatccacgccaagcacgagtggatgaccacagaggacatgctgaccgtgtggaatcgggtgtggattcaggagaacccctggatggaggataagacacctgtggagagctgggaggagatcccatacctgggcaagagggaggaccagtggtgtggctctctgatcggactgaccagccgcgccacatgggccaagaatatccaggccgccatcaaccaggtgaggtccctgatcggcaacgaggagtacaccgactatatgccctctatgaagcggttccggagggaggaggaggaggcaggcgtgctgtggtgaaaagcaaaactaacatgaaacaaggctagaagtcaggtcggattaagccatagtacggaaaaaactatgctacctgtgagccccgtccaaggacgttaaaagaagtcaggccatcataaatgccatagctggagtaaactatgcagcctgtagctccacctgagaaggtgtaaaaaatccgggaggccacaaaccatggaagctgtacgcatggcgtagtggactagcggttagaggagacccctcccttacaaatcgcagcaacaatgggggcccaaggcgagatgaagctgtagtctcgctggaaggactagaggttagaggagacccccccgaaacaaaaaacagcatattgacgctgggaaagaccagagatcctgctgtctcctcagcatcattccaggcacagaacgccagaaaatggaatggtgctgttgaatcaacaggttct

SEQ ID NO: 73 - RNA, 10176 nt, synthetic construct
  source 1..10176: mol_type = other RNA
atgaataaccaacggaaaaaggcgaaaaacacgcctttcaatatgctgaaacgcgagagaaaccgcgtgtcgactgtgcagcagctgacaaagagattcagcctgggaatgctgcagggaaggggaccactgaagctgtttatggccctggtggccttcctgcggtttctgaccatcccccctacagccggcatcctgaagagatggggcaccatcaagaagtccaaggccatcaacgtgctgcgcggctttcggaaggagatcggccggatgctgaatatcctgaaccggagaaggcgctctgccggcatgatcatcatgctgatcccaaccgtgatggccttccacctgaccacacgcaatggcgagccccacatgatcgtgtcccggcaggagaagggcaagtctctgctgtttaagacagaggacggcgtgaacatgtgcaccctgatggctatggacctgggcgagctgtgcgaggataccatcacatacaagtgtcctctgctgagacagaatgagccagaggacatcgattgctggtgtaacagcacctccacatgggtgacctacggcacctgtaccacaatgggcgagcaccggagagagaagcggagcgtggccctggtgccccacgtgggaatgggcctggagaccagaacagagacctggatgagctccgagggagcatggaagcacgtgcagcgcatcgagacatggattctgaggcaccccggcttcaccatgatggcagccatcctggcctacacaatcggcaccacacacttccagcgggccctgatctttatcctgctgacagccgtgacccctagcatgaccatgagatgcatcggcatgtccaatagggacttcgtggagggcgtgtctggaggcagctgggtggacatcgtgctggagcacggctcctgcgtgaccacaatggccaagaacaagcctaccctggactttgagctgatcaagacagaggccaagcagccagccaccctgcggaagtattgcatcgaggccaagctgaccaataccacaaccgagagccggtgtccaacacagggagagcctagcctgaacgaggagcaggacaagcggttcgtgtgcaagcacagcatggtggataggggctggggcaatggctgtggcctgttcggcaagggcggcatcgtgacctgcgccatgtttaggtgtaagaagaatatggagggcaaggtggtgcagcctgagaacctggagtacaccatcgtgatcacaccacactccggagaggagcacgcagtgggaaacgataccggcaagcacggcaaggagatcaagatcacaccacagtctagcatcaccgaggccgagctgacaggctatggcacagtgacaatggagtgcagccccaggaccggcctggacttcaatgagatggtgctgctgcagatggagaacaaggcctggctggtgcaccgccagtggtttctggacctgcctctgccctggctgcctggcgcagatacccagggcagcaattggattcagaaggagacactggtgaccttcaagaacccacacgccaagaagcaggatgtggtggtgctgggctcccaggagggagcaatgcacacagccctgaccggagccacagagatccagatgtcctctggcaacctgctgttcaccggacacctgaagtgccgcctgaggatggacaagctgcagctgaagggcatgtcttacagcatgtgcaccggcaagtttaaggtggtgaaggagatcgccgagacccagcacggcacaatcgtgatcagggtgcagtatgagggcgacggcagcccttgtaagatccccttcgagatcatggatctggagaagaggcacgtgctgggccggctgatcacagtgaatccaatcgtgaccgagaaggactctcccgtgaacatcgaggccgagccaccctttggcgatagctacatcatcatcggcgtggagcctggccagctgaagctgaattggttcaagaagggcagctccatcggccagatgtttgagacaaccatgagaggcgccaagaggatggcaatcctgggcgacaccgcatgggatttcggcagcctgggaggcgtgtttacatccatcggcaaggccctgcaccaggtgttcggagccatctatggcgccgccttttccggcgtgtcttggaccatgaagatcctgatcggcgtgatcatcacatggatcggcatgaactccagatctaccagcctgtccgtgacactggtgctggtgggcatcgtgaccctgtacctgggcgtgatggtgcaggccgattctggctgcgtggtgagctggaagaataaggagctgaagtgtggctccggcatcttcatcacagacaacgtgcacacatggaccgagcagtataagtttcagcctgagtctccaagcaagctggcctctgccatccagaaggcacacgaggagtcaatctgcggcatccgcagcgtgacccggctggagaatctgatgtggaagcagatcacacccgagctgaatcacatcctgtccgagaacgaggtgaagctgaccatcatgacaggcgacatcaagggcatcatgcaggccggcaagagatctctgaggccccagcctacagagctgaagtacagctggaagacctggggcaaggccaagatgctgagcacagagtcccacaaccagaccttcctgatcgatggccccgagacagccgagtgccctaataccaacagggcctggaacagcctggaggtggaggactacggcttcggcgtgtttacaaccaacatctggctgaagctgaaggagaagcaggacgtgttctgtgatagcaagctgatgtccgccgccatcaaggacaatcgcgccgtgcacgccgatatgggctattggatcgagagcgccctgaacgacacctggaagatcgagaaggcctcctttatcgaggtgaagaattgtcactggcctaagtcccacacactgtggtctaacggcgtgctggagtccgagatgatcatcccaaagaatctggccggccccgtgtctcagcacaactaccggcctggctatcacacccagatcacaggcccctggcacctgggcaagctggagatggacttcgatttttgcgacggcacaaccgtggtggtgaccgaggattgtggcaacagaggcccatctctgaggacaaccacagccagcggcaagctgatcacagagtggtgctgtcggagctgcaccctgcctccactgagatacaggggcgaggatggctgttggtatggcatggagatcagacccctgaaggagaaggaggagaatctggtgaacagcctggtgaccgcaggccacggccaggtggacaatttctccctgggcgtgctgggcatggccctgtttctggaggagatgctgcgcaccagagtgggcacaaagcacgccatcctgctggtggccgtgtccttcgtgaccctgatcacaggcaacatgtcttttagagacctgggcagagtgatggtcatggtgggcgccacaatgaccgacgacatcggcatgggagtgacctacctggccctgctggcagccttcaaggtgcgcccaacctttgccgcaggactgctgctgaggaagctgacatccaaggagctgatgatgaccacaatcggcatcgtgctgctgtcccagtctaccatccccgagacaatcctggagctgaccgatgcactggccctgggcatgatggtgctgaagatggtgagaaatatggagaagtatcagctggccgtgaccatcatggccatcctgtgcgtgcccaatgccgtgatcctgcagaacgcctggaaggtgagctgtacaatcctggccgtggtgagcgtgtcccctctgctgctgacatctagccagcagaagaccgactggattcccctggccctgacaatcaagggcctgaaccctaccgccatcttcctgaccacactgtctcgcaccagcaagaagcggagctggcccctgaatgaggccatcatggccgtgggcatggtgtccatcctggcctcctctctgctgaagaacgacatccctatgaccggaccactggtggcaggaggactgctgacagtgtgctacgtgctgaccggcagatccgccgacctggagctggagagggcagcagacgtgaagtgggaggatcaggccgagatctctggcagctcccccatcctgtctatcaccatcagcgaggacggctctatgagcatcaagaacgaggaggaggagcagacactgaccatcctgatcaggaccggcctgctggtcatcagcggcctgttccccgtgtccatccctatcacagctgccgcctggtacctgtgggaggtgaagaagcagagggcaggcgtgctgtgggacgtgccttctccccctccaatgggcaaggccgagctggaggatggcgcctatcgcatcaagcagaagggcatcctgggatacagccagatcggagcaggcgtgtataaggagggcacctttcacacaatgtggcacgtgaccagaggcgccgtgctgatgcacaagggcaagaggatcgagcctagctgggccgacgtgaagaaggatctgatctcctacggcggaggatggaagctggagggagagtggaaggagggagaggaggtgcaggtgctggccctggagccaggcaagaatcccagagccgtgcagaccaagccaggcctgttcaagaccaacgcaggcacaatcggagccgtgtccctggacttttctcctggcacatccggctctccaatcatcgataagaagggcaaggtggtgggcctgtacggaaatggagtggtgacccggagcggagcctacgtgagcgccatcgcccagacagagaagtccatcgaggacaaccccgagatcgaggacgacatcttccggaagaggcgcctgaccatcatggatctgcacccaggcgccggcaagacaaagagatacctgccagcaatcgtgcgggaggccatcaagaggggactgcggacactgatcctggcacctaccagggtggtggcagcagagatggaggaggccctgagaggcctgcccatcaggtatcagacacctgccatcagagccgagcacaccggcagggagatcgtggacctgatgtgccacgccacattcaccatgaggctgctgagccctgtgcgggtgccaaattacaacctgatcatcatggacgaggcccactttaccgatccagcctctatcgccgccagaggctatatcagcacaagggtggagatgggagaggcagcaggaatcttcatgacagcaaccccccctggctcccgcgacccatttccccagtctaatgcccccatcatcgatgaggagcgcgagatccctgagcggtcctggaactctggccacgagtgggtgacagacttcaagggcaagaccgtgtggtttgtgccctccatcaaggccggcaatgacatcgccgcctgcctgagaaagaacggcaagaaagtgatccagctgtctaggaagaccttcgacagcgagtacgtgaagacacgcaccaatgactgggatttcgtggtgaccacagacatcagcgagatgggcgccaactttaaggccgagagagtgatcgacccacggagatgtatgaagcccgtgatcctgaccgatggcgaggagagagtgatcctggccggccctatgccagtgacacactctagcgccgcacagaggcgcggcagaatcggaaggaatcccaagaatgagaacgatcagtacatctatatgggcgagcctctggagaacgacgaggattgcgcccactggaaggaggccaagatgctgctggacaatatcaacaccccagagggcatcatccccagcatgttcgagcctgagagggagaaggtggacgccatcgatggagagtacagactgaggggagaggcaaggaagacatttgtggacctgatgaggagaggcgatctgcccgtgtggctggcatacagggtggcagccgagggcatcaattatgccgacaggcgctggtgtttcgatggcgtgaagaacaatcagatcctggaggagaacgtggaggtggagatctggaccaaggagggcgagaggaagaagctgaagcccagatggctggacgccaggatctactctgatcctctggccctgaaggagttcaaggagtttgcagcaggaaggaagagcctgaccctgaacctgatcacagagatgggccgcctgcctacctttatgacacagaaggccagagacgccctggataatctggccgtgctgcacaccgcagaggcaggcggcagagcatataaccacgccctgtctgagctgccagagaccctggagacactgctgctgctgacactgctggccacagtgaccggcggcatcttcctgtttctgatgagcggcagaggcatcggcaagatgacactgggcatgtgctgtatcatcaccgccagcatcctgctgtggtacgcccagatccagccacactggatcgccgcctccatcatcctggagttctttctgatcgtgctgctgatccccgagcctgagaagcagcggacaccccaggataatcagctgacctacgtggtcatcgccatcctgaccgtggtggccgccacaatggccaacgagatgggcttcctggagaagaccaagaaggacctgggactgggctccatcgcaacacagcagccagagtctaacatcctggacatcgatctgaggccagcaagcgcctggaccctgtacgcagtggccaccacatttgtgacacccatgctgcgccactccatcgagaacagcagcgtgaacgtgtctctgacagccatcgccaatcaggcaaccgtgctgatgggactgggcaagggatggccactgtccaagatggacatcggcgtgcccctgctggcaatcggatgctactctcaggtgaaccccatcacactgaccgccgccctgttcctgctggtggcacactatgccatcatcggccctggcctgcaggccaaggccacccgcgaggcacagaagagggctgccgccggcatcatgaagaatcccaccgtggacggcatcacagtgatcgacctggaccccatcccctacgatcctaagttcgagaagcagctgggccaggtcatgctgctggtgctgtgcgtgacccaggtgctgatgatgaggaccacatgggcactgtgcgaggccctgaccctggcaacaggccctatctccacactgtgggagggcaatccaggcaggttttggaacaccacaatcgccgtgagcatggccaacatcttccgcggctcctacctggcaggagcaggactgctgttttctatcatgaagaataccacaaacacccggagaggcacaggcaatatcggcgagaccctgggcgagaagtggaagtctcggctgaacgccctgggcaagagcgagttccagatctataagaagtccggcatccaggaggtggaccgcaccctggcaaaggagggcatcaagaggggagagacagatcaccacgccgtgagcagaggctccgccaagctgagatggtttgtggagaggaacatggtgacccccgagggcaaggtggtggatctgggatgcggccggggaggctggagctactattgtggaggcctgaagaatgtgagagaggtgaagggactgaccaagggaggccctggccacgaggagcctatcccaatgtccacatacggctggaacctggtgcgcctgcagtctggcgtggacgtgttctttatcccacccgagaagtgcgacaccctgctgtgcgacatcggcgagagctcccccaatcctacagtggaggcaggacgcaccctgcgggtgctgaatctggtggagaactggctgaacaataacacccagttctgcatcaaggtgctgaacccctacatgccttccgtgatcgagaagatggaggccctgcagaggaagtatggcggcgccctggtgcgcaatcctctgtctcggaacagcacccacgagatgtattgggtgtccaatgcctctggcaacatcgtgtctagcgtgaatatgatcagccgcatgctgatcaaccgctttacaatgcggtacaagaaggccacctatgagccagacgtggatctgggcagcggcacccggaatatcggcatcgagtccgagatccccaacctggacatcatcggcaagagaatcgagaagatcaagcaggagcacgagaccagctggcactacgaccaggatcacccatataagacatgggcctaccacggctcttatgagaccaagcagacaggcagcgcctcctctatggtgaacggcgtggtgagactgctgaccaagccctgggacgtggtgcctatggtgacccagatggccatgacagataccacacctttcggccagcagagagtgtttaaggagaaggtggatacaaggacccaggagccaaaggagggcacaaagaagctgatgaagatcaccgccgagtggctgtggaaggagctgggcaagaagaagacccccagaatgtgcacaagggaggagttcaccagaaaggtgaggtccaatgccgccctgggcgccatctttaccgacgagaacaagtggaagtccgccagagaggccgtggaggactctaggttctgggagctggtggataaggagaggaatctgcacctggagggcaagtgcgagacctgcgtgtacaacatgatgggcaagcgcgagaagaagctgggcgagtttggcaaggccaagggcagcagagccatctggtatatgtggctgggcgccaggttcctggagtttgaggccctgggcttcctgaatgaggatcactggtttagccgggagaacagcctgtccggagtggagggagagggactgcacaagctgggctacatcctgagagacgtgtccaagaaggagggcggcgccatgtatgcagacgataccgcaggatgggacaccaggatcacactggaggatctgaagaatgaggagatggtgaccaaccacatggagggcgagcacaagaagctggccgaggccatcttcaagctgacataccagaataaggtggtgcgcgtgcagaggccaacccccaggggcacagtgatggacatcatcagcaggcgcgatcagaggggctccggacaagtgggcacctatggcctgaatacattcaccaacatggaggcccagctgatccggcagatggagggcgagggcgtgtttaagtccatccagcacctgacaatcaccgaggagatcgccgtgcagaactggctggcccgcgtgggaagggagcggctgtctcggatggccatcagcggcgacgattgcgtggtgaagcctctggacgatagattcgccagcgccctgaccgccctgaatgacatgggcaagatccgcaaggacatccagcagtgggagccttctcggggctggaacgattggacacaggtgccattctgcagccaccactttcacgagctgatcatgaaggacggacgcgtgctggtggtgccatgtcggaatcaggatgagctgatcggaagagcaaggatctcccagggagcaggatggtctctgagggagaccgcctgcctgggcaagagctacgcccagatgtggtccctgatgtattttcacaggagagacctgaggctggcagcaaacgccatctgtagcgccgtgccttcccactgggtgccaacctccagaaccacatggtctatccacgccaagcacgagtggatgaccacagaggacatgctgaccgtgtggaatcgggtgtggattcaggagaacccctggatggaggataagacacctgtggagagctgggaggagatcccatacctgggcaagagggaggaccagtggtgtggctctctgatcggactgaccagccgcgccacatgggccaagaatatccaggccgccatcaaccaggtgaggtccctgatcggcaacgaggagtacaccgactatatgccctctatgaagcggttccggagggaggaggaggaggcaggcgtgctgtggtga

SEQ ID NO: 74 - RNA, 10807 nt, synthetic construct
  source 1..10807: mol_type = other RNA
agttgttgatctgtgtgaatcagactgcgacagttcgagtttgaagcgaaagctagcaacagtatcaacaggttttattttggatttggaaacgagagtttctggtcatgaaaaacccaaaaaagaaatccggaggattccggattgtcaatatgctaaaacgcggagtagcccgtgtgagcccattcgggggactgaagcgcctgcctgcaggcctgctgctgggccacggcccaatcagaatggtgctggccatcctggccttcctgaggtttacagccatcaagccctctctgggcctgatcaacagatggggcagcgtgggcaagaaggaggctatggagacaatcaagaagttcaagaaggatctggccgccatgctgcggatcatcaatgccagaaaggagaagaagcggagaggagcagacacatccgtgggaatcgtgggcctgctgctgaccacagctatggccgcagaggtgaccaggaggggctctgcctactatatgtacctggaccgcaacgatgccggcaaggccatcagcttccctaccacactgggcatgaataagtgttacatccagatcatggatctgggccacatgtgcgacgccaccatgagctatgagtgtcccatgctggatgagggcgtggagcctgacgatgtggactgctggtgtaacaccacatccacctgggtggtgtacggcacatgtcaccacaagaagggagaggcacggagatctaggcgcgcagtgaccctgccaagccactccacaaggaagctgcagacccgctctcagacatggctggagagccgggagtataccaagcacctgatccgggtggagaattggatctttagaaacccaggcttcgcactggctgccgccgccatcgcatggctgctgggcagctccacctcccagaaagtgatctacctggtcatgatcctgctgatcgcccccgcctattctatcaggtgcatcggcgtgagcaaccgcgatttcgtggagggcatgtctggaggcacctgggtggacgtggtgctggagcacggaggatgcgtgaccgtgatggcccaggataagccaacagtggacatcgagctggtgaccacaaccgtgtccaatatggccgaggtgagatcttactgctatgaggcctctatcagcgacatggcctccgattctaggtgtccaacccagggagaggcctacctggacaagcagtccgatacccagtacgtgtgcaagcggacactggtggacagaggctggggcaacggctgtggcctgtttggcaagggctctctggtgacctgcgccaagttcgcctgtagcaagaagatgaccggcaagtccatccagcccgagaatctggagtaccgcatcatgctgtccgtgcacggctcccagcactctggcatgatcgtgaatgataccggccacgagacagacgagaacagagccaaggtggagatcacccccaatagccctagggccgaggccacactgggaggatttggctccctgggcctggattgcgagccaaggaccggcctggacttcagcgatctgtactatctgacaatgaacaataagcactggctggtgcacaaggagtggtttcacgacatccccctgccttggcacgcaggagcagacacaggcaccccacactggaacaataaggaggccctggtggagttcaaggacgcccacgccaagagacagacagtggtggtgctgggcagccaggagggagcagtgcacaccgccctggcaggcgccctggaggccgagatggatggagcaaagggcaggctgtctagcggacacctgaagtgccggctgaagatggacaagctgagactgaagggcgtgagctactccctgtgcacagccgccttcaccttcaccaagatccctgccgagacactgcacggcaccgtgaccgtggagctgcagtatgccggcacagatggcccttgtaaggtgcccgcccagatggccgtggacatgcagacactgacccccgtgggcagactgatcaccgccaaccctgtgatcacagagtctaccgagaatagcaagatgatgctggagctggacccccctttcggcgactcctacatcgtgatcggcgtgggcgagaagaagatcacccaccactggcacaggtctggcagcaccatcggcaaggcctttgaggccacagtgcggggagcaaagaggatggccgtgctcggcgacaccgcatgggatttcggcagcgtgggaggggccctgaacagcctgggcaagggcattcaccagatcttcggcgccgcctttaagagcctgttcggcggcatgagctggttttcccagatcctgatcggcaccctgctgatgtggctgggcctgaacacaaagaatggctccatctctctgatgtgcctggccctgggaggcgtgctgatcttcctgtccaccgccgtgtctgccgatgtgggatgcagcgtggacttttccaagaaggagacacggtgtggcacaggcgtgttcgtgtacaacgatgtggaggcctggagggaccgctacaagtatcacccagattccccacggagactggctgccgccgtgaagcaggcctgggaggactcaatctgtggcatcagcagcgtgagccggatggagaatatcatgtggcgctctgtggagggcgagctgaatgccatcctggaggagaacggagtgcagctgaccgtggtggtgggcagcgtgaagaaccctatgtggaggggaccacagcgcctgccagtgcccgtgaatgagctgcctcacggctggaaggcctggggcaagtcttactttgtgagagccgccaagaccaacaatagcttcgtggtggacggcgatacactgaaggagtgcccactgaagcacagggcctggaactcctttctggtggaggaccacggcttcggcgtgtttcacacatccgtgtggctgaaggtgagagaggattactctctggagtgtgaccctgccgtgatcggcaccgcagtgaagggcaaggaggcagtgcactctgatctgggctattggatcgagagcgagaagaacgacacatggaggctgaagcgcgcccacctgatcgagatgaagacctgcgagtggccaaagtcccacacactgtggaccgatggcatcgaggagtctgacctgatcatccccaagtccctggccggccctctgtctcaccacaataccagagagggctacagaacacagatgaagggcccctggcacagcgaggagctggagatcaggttcgaggagtgccccggcaccaaggtgcacgtggaggagacatgtggcaccaggggcccctctctgcgcagcacaaccgccagcggcagagtgatcgaggagtggtgctgtcgcgagtgcaccatgccacccctgtcctttcgcgccaaggacggctgttggtatggcatggagatccggcctagaaaggagccagagtccaacctggtgcggtctatggtgaccgccggctccacagaccacatggatcacttctctctgggcgtgctggtcatcctgctgatggtgcaggagggcctgaagaagagaatgacaaccaagatcatcatcagcaccagcatggccgtgctggtggcaatgatcctgggaggcttttctatgagcgatctggccaagctggccatcctgatgggcgccaccttcgccgagatgaacacaggaggcgacgtggcacacctggccctgatcgccgcctttaaggtgaggcctgccctgctggtgagcttcatctttagggccaattggacaccacgcgagtccatgctgctggccctggcatcttgcctgctgcagaccgccatctccgccctggagggcgatctgatggtgctgatcaacggattcgcactggcatggctggcaatccgggctatggtggtgcccagaaccgacaatatcacactggcaatcctggccgccctgacccctctggcccggggcaccctgctggtggcatggagagcaggcctggcaacatgcggcggctttatgctgctgagcctgaagggcaagggctccgtgaagaagaacctgccattcgtgatggcactgggcctgaccgccgtgcgcctggtggaccccatcaatgtggtgggcctgctgctgctgacaaggtctggcaagcgcagctggcctccatccgaggtgctgaccgcagtgggcctgatctgtgcactggcaggaggatttgcaaaggcagacatcgagatggcaggacctatggccgcagtgggcctgctgatcgtgtcctacgtggtgtccggcaagtctgtggacatgtatatcgagagagccggcgacatcacctgggagaaggacgccgaggtgacaggcaactctcctaggctggacgtggccctggatgagtctggcgactttagcctggtggaggacgatggcccccctatgcgggagatcatcctgaaggtggtgctgatgacaatctgcggcatgaatccaatcgcaatccctttcgccgcaggagcatggtacgtgtatgtgaagaccggcaagcggagcggcgccctgtgggatgtgcctgccccaaaggaggtgaagaagggcgagacaaccgacggcgtgtacagagtgatgaccaggcgcctgctgggcagcacacaagtgggagtgggcgtgatgcaggagggcgtgttccacaccatgtggcacgtgacaaagggctccgccctgcggtctggagagggcagactggacccttactggggcgatgtgaagcaggacctggtgtcctattgtggaccctggaagctggatgcagcatgggacggacactctgaggtgcagctgctggccgtgccacccggcgagagggcaaggaacatccagaccctgcccggcatctttaagacaaaggacggcgacatcggagcagtggccctggattaccctgcaggcacctccggctctccaatcctggacaagtgcggcagagtgatcggcctgtacggcaatggcgtggtcatcaagaacggcagctacgtgagcgccatcacccagggccggagagaggaggagacaccagtggagtgtttcgagccctccatgctgaagaagaagcagctgaccgtgctggatctgcaccccggcgcaggcaagacaaggcgcgtgctgcctgagatcgtgcgcgaggccatcaagacccggctgcgtacggtgatcctggcaccaaccagagtggtggcagcagagatggaggaggccctgaggggcctgcctgtgcgctacatgacaaccgccgtgaacgtgacccacagcggcacagagatcgtggacctgatgtgccacgccaccttcaccagccggctgctgcagccaatccgcgtgcccaactacaatctgtatatcatggatgaggcccacttcacagacccaagctccatcgccgccagaggctatatcagcaccagagtggagatgggcgaggctgccgccatctttatgacagccacccctccaggcacacgcgatgcattcccagacagcaattcccctatcatggacaccgaggtggaggtgcctgagagggcatggtctagcggcttcgattgggtgaccgaccactttggcaagacagtgtggttcgtgccatctgtgcggaacggcaatgagatcgccgcctgtctgacaaaggccggcaagagagtgatccagctgagccgcaagaccttcgagacagagttccagaagaccaagcaccaggagtgggattttgtcgtgacaaccgacatctctgagatgggcgccaacttcaaggccgatagagtgatcgacagccggagatgcctgaagcctgtgatcctggatggcgagagagtgatcctggccggccccatgcctgtgacccacgcatccgccgcacagaggcggggcagaatcggcagaaaccctaataagccaggcgacgagtacctgtatggcggcggctgtgccgagacagacgaggatcacgcacactggctggaggcaaggatgctgctggataatatctacctgcaggacggcctgatcgccagcctgtataggccagaggcagataaggtggcagcaatcgagggcgagtttaagctgcggaccgagcagagaaagacattcgtggagctgatgaagaggggcgacctgcccgtgtggctggcataccaggtggcatctgccggcatcacatataccgatcggagatggtgcttcgacggcacaaccaacaatacaatcatggaggatagcgtgcccgcagaagtgtggacccggcacggcgagaagagagtgctgaagcctaggtggatggatgccagagtgtgcagcgaccacgccgccctgaagtccttcaaggagtttgcagcaggcaagagaggagcagcctttggcgtgatggaggccctgggcaccctgcccggccacatgacagagaggttccaggaggccatcgacaacctggccgtgctgatgagggcagagacaggcagccggccctacaaggctgccgccgcccagctgcccgagacactggagacaatcatgctgctgggcctgctgggcacagtgagcctgggcatcttctttgtgctgatgagaaataagggcatcggcaagatgggctttggaatggtgaccctgggagcatctgcctggctgatgtggctgagcgagatcgagcccgccagaatcgcctgcgtgctgatcgtggtgttcctgctgctggtggtgctgatcccagagcccgagaagcagaggagccctcaggataaccagatggccatcatcatcatggtggcagtgggcctgctgggcctgatcaccgccaatgagctgggctggctggagagaacaaagtctgacctgagccacctgatgggcaggcgcgaggagggagcaaccatcggctttagcatggacatcgatctgaggccagcatccgcctgggcaatctacgccgccctgacaaccttcatcacaccagcagtgcagcacgcagtgacaaccagctacaacaattattccctgatggctatggccacccaggcaggcgtgctgttcggaatgggcaagggcatgcctttttacgcctgggacttcggcgtgccactgctgatgatcggctgctatagccagctgacaccactgaccctgatcgtggccatcatcctgctggtggcccactacatgtatctgatccccggcctgcaggccgccgccgccagagccgcccagaagagaacagccgccggcatcatgaagaaccctgtggtggatggcatcgtggtgaccgacatcgatacaatgaccatcgacccacaggtggagaagaagatgggacaggtgctgctgatcgcagtggccgtgtcctctgccatcctgtccagaacagcatggggatggggagaggcaggcgccctgatcaccgccgccacatctaccctgtgggagggcagccccaataagtactggaacagctccacagccaccagcctgtgcaacatctttcgcggctcctacctggcaggagcctctctgatctatacagtgacccggaatgcaggcctggtgaagaggagaggaggaggcacaggagagacactgggagagaagtggaaggccaggctgaaccagatgtccgccctggagttctacagctataagaagtccggcatcacagaggtgtgccgcgaggaggccaggcgcgccctgaaggatggcgtggcaaccggaggacacgccgtgagccggggcagcgccaagctgaggtggctggtggagaggggctacctgcagccctacggcaaagtgatcgacctgggatgtggccgcggaggatggagctactatgtggcaaccatccggaaggtgcaggaggtgaagggctacacaaagggaggcccaggccacgaggagcccgtgctggtgcagagctatggctggaatatcgtgagacttaagagcggagtggacgtgttccacatggcagcagagccatgcgatacactgctgtgcgacatcggcgagtctagctcctctccagaggtggaggaggcaaggaccctgcgcgtgctgagcatggtgggcgactggctggagaagcgcccaggcgccttctgcatcaaggtgctgtgcccctacacatccaccatgatggagacactggagcggctgcagcggagatatggaggaggcctggtgcgggtgccactgagcagaaactccacacacgagatgtactgggtgtctggcgccaagagcaataccatcaagtctgtgagcacaaccagccagctgctgctgggaaggatggatggaccaaggcgccctgtgaagtatgaggaggacgtgaacctgggctccggcacccgcgccgtggtgtcttgcgccgaggcccccaatatgaagatcatcggcaaccggatcgagcggatcagaagcgagcacgccgagacatggttctttgacgagaaccacccctacagaacatgggcctaccacggcagctatgaggcacctacccagggctccgccagctccctgatcaatggcgtggtgaggctgctgagcaagccctgggatgtggtgacaggcgtgaccggcatcgccatgaccgacacaaccccttatggccagcagagggtgtttaaggagaaggtggatacccgcgtgcctgacccacaggagggcacacggcaggtcatgagcatggtgtctagctggctgtggaaggagctgggcaagcacaagcggcccagagtgtgcacaaaggaggagtttatcaataaggtgcgctccaacgccgccctgggagcaatcttcgaggaggagaaggagtggaagaccgccgtggaggccgtgaacgatccacggttctgggccctggtggacaaggagagggagcaccacctgaggggagagtgccagtcctgcgtgtacaatatgatgggcaagagggagaagaagcagggcgagtttggcaaggccaagggctctcgcgccatctggtatatgtggctgggcgcccggttcctggagtttgaggccctgggcttcctgaacgaggaccactggatgggaagagagaacagcggaggaggagtggagggcctgggcctgcagaggctgggctacgtgctggaggagatgagcagaatccccggcggccggatgtatgccgacgataccgccggctgggatacacggatctccagatttgacctggagaatgaggccctgatcaccaaccagatggagaagggacacagagccctggccctggccatcatcaagtacacatatcagaacaaggtggtgaaggtgctgaggcctgccgagaagggcaagaccgtgatggacatcatcagcaggcaggaccagaggggctccggacaggtggtgacctacgccctgaatacattcaccaacctggtggtgcagctgatccggaatatggaggccgaggaggtgctggagatgcaggatctgtggctgctgcggagatctgagaaggtgaccaattggctgcagagcaacggctgggacaggctgaagaggatggccgtgagcggcgacgattgcgtggtgaagcccatcgacgataggtttgcccacgccctgcgcttcctgaacgatatgggcaaggtgcgcaaggacacccaggagtggaagccttctacaggctgggataactgggaggaggtgccattttgcagccaccacttcaataagctgcacctgaaggatggccggtccatcgtggtgccttgtagacaccaggacgagctgatcggaagggcccgcgtgagcccaggcgcaggctggtccatccgggagacagcctgcctggccaagtcctacgcccagatgtggcagctgctgtatttccacaggcgcgatctgagactgatggccaatgccatctgttcctctgtgcctgtggactgggtgccaaccggcaggacaacctggagcatccacggcaagggcgagtggatgacaaccgaggacatgctggtggtgtggaatcgcgtgtggatcgaggagaacgatcacatggaggacaagacaccagtgaccaagtggacagacatcccctacctgggcaagagggaggacctgtggtgcggcagcctgatcggacacaggccaagaacaacctgggcagagaacatcaagaataccgtgaacatggtgcggagaatcatcggcgatgaggagaagtatatggactatctgtccactcaggtccgctatctgggcgaagaaggctcaactcccggcgtgctgtaagcaccaatcttaatgttgtcaggcctgctagtcagccacagcttggggaaagctgtgcagcctgtgacccccccaggagaagctgggaaaccaagcctatagtcaggccgagaacgccatggcacggaagaagccatgctgcctgtgagcccctcagaggacactgagtcaaaaaaccccacgcgcttggaggcgcaggatgggaaaagaaggtggcgaccttccccacccttcaatctggggcctgaactggagatcagctgtggatctccagaagagggactagtggttagaggagaccccccggaaaacgcaaaacagcatattgacgctgggaaagaccagagactccatgagtttccaccacgctggccgccaggcacagatcgccgaatagcggcggccggtgtggggaaatccatgggtct

SEQ ID NO: 75 - RNA, 10272 nt, synthetic construct
  source 1..10272: mol_type = other RNA
atgaaaaacccaaaaaagaaatccggaggattccggattgtcaatatgctaaaacgcggagtagcccgtgtgagcccattcgggggactgaagcgcctgcctgcaggcctgctgctgggccacggcccaatcagaatggtgctggccatcctggccttcctgaggtttacagccatcaagccctctctgggcctgatcaacagatggggcagcgtgggcaagaaggaggctatggagacaatcaagaagttcaagaaggatctggccgccatgctgcggatcatcaatgccagaaaggagaagaagcggagaggagcagacacatccgtgggaatcgtgggcctgctgctgaccacagctatggccgcagaggtgaccaggaggggctctgcctactatatgtacctggaccgcaacgatgccggcaaggccatcagcttccctaccacactgggcatgaataagtgttacatccagatcatggatctgggccacatgtgcgacgccaccatgagctatgagtgtcccatgctggatgagggcgtggagcctgacgatgtggactgctggtgtaacaccacatccacctgggtggtgtacggcacatgtcaccacaagaagggagaggcacggagatctaggcgcgcagtgaccctgccaagccactccacaaggaagctgcagacccgctctcagacatggctggagagccgggagtataccaagcacctgatccgggtggagaattggatctttagaaacccaggcttcgcactggctgccgccgccatcgcatggctgctgggcagctccacctcccagaaagtgatctacctggtcatgatcctgctgatcgcccccgcctattctatcaggtgcatcggcgtgagcaaccgcgatttcgtggagggcatgtctggaggcacctgggtggacgtggtgctggagcacggaggatgcgtgaccgtgatggcccaggataagccaacagtggacatcgagctggtgaccacaaccgtgtccaatatggccgaggtgagatcttactgctatgaggcctctatcagcgacatggcctccgattctaggtgtccaacccagggagaggcctacctggacaagcagtccgatacccagtacgtgtgcaagcggacactggtggacagaggctggggcaacggctgtggcctgtttggcaagggctctctggtgacctgcgccaagttcgcctgtagcaagaagatgaccggcaagtccatccagcccgagaatctggagtaccgcatcatgctgtccgtgcacggctcccagcactctggcatgatcgtgaatgataccggccacgagacagacgagaacagagccaaggtggagatcacccccaatagccctagggccgaggccacactgggaggatttggctccctgggcctggattgcgagccaaggaccggcctggacttcagcgatctgtactatctgacaatgaacaataagcactggctggtgcacaaggagtggtttcacgacatccccctgccttggcacgcaggagcagacacaggcaccccacactggaacaataaggaggccctggtggagttcaaggacgcccacgccaagagacagacagtggtggtgctgggcagccaggagggagcagtgcacaccgccctggcaggcgccctggaggccgagatggatggagcaaagggcaggctgtctagcggacacctgaagtgccggctgaagatggacaagctgagactgaagggcgtgagctactccctgtgcacagccgccttcaccttcaccaagatccctgccgagacactgcacggcaccgtgaccgtggagctgcagtatgccggcacagatggcccttgtaaggtgcccgcccagatggccgtggacatgcagacactgacccccgtgggcagactgatcaccgccaaccctgtgatcacagagtctaccgagaatagcaagatgatgctggagctggacccccctttcggcgactcctacatcgtgatcggcgtgggcgagaagaagatcacccaccactggcacaggtctggcagcaccatcggcaaggcctttgaggccacagtgcggggagcaaagaggatggccgtgctcggcgacaccgcatgggatttcggcagcgtgggaggggccctgaacagcctgggcaagggcattcaccagatcttcggcgccgcctttaagagcctgttcggcggcatgagctggttttcccagatcctgatcggcaccctgctgatgtggctgggcctgaacacaaagaatggctccatctctctgatgtgcctggccctgggaggcgtgctgatcttcctgtccaccgccgtgtctgccgatgtgggatgcagcgtggacttttccaagaaggagacacggtgtggcacaggcgtgttcgtgtacaacgatgtggaggcctggagggaccgctacaagtatcacccagattccccacggagactggctgccgccgtgaagcaggcctgggaggactcaatctgtggcatcagcagcgtgagccggatggagaatatcatgtggcgctctgtggagggcgagctgaatgccatcctggaggagaacggagtgcagctgaccgtggtggtgggcagcgtgaagaaccctatgtggaggggaccacagcgcctgccagtgcccgtgaatgagctgcctcacggctggaaggcctggggcaagtcttactttgtgagagccgccaagaccaacaatagcttcgtggtggacggcgatacactgaaggagtgcccactgaagcacagggcctggaactcctttctggtggaggaccacggcttcggcgtgtttcacacatccgtgtggctgaaggtgagagaggattactctctggagtgtgaccctgccgtgatcggcaccgcagtgaagggcaaggaggcagtgcactctgatctgggctattggatcgagagcgagaagaacgacacatggaggctgaagcgcgcccacctgatcgagatgaagacctgcgagtggccaaagtcccacacactgtggaccgatggcatcgaggagtctgacctgatcatccccaagtccctggccggccctctgtctcaccacaataccagagagggctacagaacacagatgaagggcccctggcacagcgaggagctggagatcaggttcgaggagtgccccggcaccaaggtgcacgtggaggagacatgtggcaccaggggcccctctctgcgcagcacaaccgccagcggcagagtgatcgaggagtggtgctgtcgcgagtgcaccatgccacccctgtcctttcgcgccaaggacggctgttggtatggcatggagatccggcctagaaaggagccagagtccaacctggtgcggtctatggtgaccgccggctccacagaccacatggatcacttctctctgggcgtgctggtcatcctgctgatggtgcaggagggcctgaagaagagaatgacaaccaagatcatcatcagcaccagcatggccgtgctggtggcaatgatcctgggaggcttttctatgagcgatctggccaagctggccatcctgatgggcgccaccttcgccgagatgaacacaggaggcgacgtggcacacctggccctgatcgccgcctttaaggtgaggcctgccctgctggtgagcttcatctttagggccaattggacaccacgcgagtccatgctgctggccctggcatcttgcctgctgcagaccgccatctccgccctggagggcgatctgatggtgctgatcaacggattcgcactggcatggctggcaatccgggctatggtggtgcccagaaccgacaatatcacactggcaatcctggccgccctgacccctctggcccggggcaccctgctggtggcatggagagcaggcctggcaacatgcggcggctttatgctgctgagcctgaagggcaagggctccgtgaagaagaacctgccattcgtgatggcactgggcctgaccgccgtgcgcctggtggaccccatcaatgtggtgggcctgctgctgctgacaaggtctggcaagcgcagctggcctccatccgaggtgctgaccgcagtgggcctgatctgtgcactggcaggaggatttgcaaaggcagacatcgagatggcaggacctatggccgcagtgggcctgctgatcgtgtcctacgtggtgtccggcaagtctgtggacatgtatatcgagagagccggcgacatcacctgggagaaggacgccgaggtgacaggcaactctcctaggctggacgtggccctggatgagtctggcgactttagcctggtggaggacgatggcccccctatgcgggagatcatcctgaaggtggtgctgatgacaatctgcggcatgaatccaatcgcaatccctttcgccgcaggagcatggtacgtgtatgtgaagaccggcaagcggagcggcgccctgtgggatgtgcctgccccaaaggaggtgaagaagggcgagacaaccgacggcgtgtacagagtgatgaccaggcgcctgctgggcagcacacaagtgggagtgggcgtgatgcaggagggcgtgttccacaccatgtggcacgtgacaaagggctccgccctgcggtctggagagggcagactggacccttactggggcgatgtgaagcaggacctggtgtcctattgtggaccctggaagctggatgcagcatgggacggacactctgaggtgcagctgctggccgtgccacccggcgagagggcaaggaacatccagaccctgcccggcatctttaagacaaaggacggcgacatcggagcagtggccctggattaccctgcaggcacctccggctctccaatcctggacaagtgcggcagagtgatcggcctgtacggcaatggcgtggtcatcaagaacggcagctacgtgagcgccatcacccagggccggagagaggaggagacaccagtggagtgtttcgagccctccatgctgaagaagaagcagctgaccgtgctggatctgcaccccggcgcaggcaagacaaggcgcgtgctgcctgagatcgtgcgcgaggccatcaagacccggctgcgtacggtgatcctggcaccaaccagagtggtggcagcagagatggaggaggccctgaggggcctgcctgtgcgctacatgacaaccgccgtgaacgtgacccacagcggcacagagatcgtggacctgatgtgccacgccaccttcaccagccggctgctgcagccaatccgcgtgcccaactacaatctgtatatcatggatgaggcccacttcacagacccaagctccatcgccgccagaggctatatcagcaccagagtggagatgggcgaggctgccgccatctttatgacagccacccctccaggcacacgcgatgcattcccagacagcaattcccctatcatggacaccgaggtggaggtgcctgagagggcatggtctagcggcttcgattgggtgaccgaccactttggcaagacagtgtggttcgtgccatctgtgcggaacggcaatgagatcgccgcctgtctgacaaaggccggcaagagagtgatccagctgagccgcaagaccttcgagacagagttccagaagaccaagcaccaggagtgggattttgtcgtgacaaccgacatctctgagatgggcgccaacttcaaggccgatagagtgatcgacagccggagatgcctgaagcctgtgatcctggatggcgagagagtgatcctggccggccccatgcctgtgacccacgcatccgccgcacagaggcggggcagaatcggcagaaaccctaataagccaggcgacgagtacctgtatggcggcggctgtgccgagacagacgaggatcacgcacactggctggaggcaaggatgctgctggataatatctacctgcaggacggcctgatcgccagcctgtataggccagaggcagataaggtggcagcaatcgagggcgagtttaagctgcggaccgagcagagaaagacattcgtggagctgatgaagaggggcgacctgcccgtgtggctggcataccaggtggcatctgccggcatcacatataccgatcggagatggtgcttcgacggcacaaccaacaatacaatcatggaggatagcgtgcccgcagaagtgtggacccggcacggcgagaagagagtgctgaagcctaggtggatggatgccagagtgtgcagcgaccacgccgccctgaagtccttcaaggagtttgcagcaggcaagagaggagcagcctttggcgtgatggaggccctgggcaccctgcccggccacatgacagagaggttccaggaggccatcgacaacctggccgtgctgatgagggcagagacaggcagccggccctacaaggctgccgccgcccagctgcccgagacactggagacaatcatgctgctgggcctgctgggcacagtgagcctgggcatcttctttgtgctgatgagaaataagggcatcggcaagatgggctttggaatggtgaccctgggagcatctgcctggctgatgtggctgagcgagatcgagcccgccagaatcgcctgcgtgctgatcgtggtgttcctgctgctggtggtgctgatcccagagcccgagaagcagaggagccctcaggataaccagatggccatcatcatcatggtggcagtgggcctgctgggcctgatcaccgccaatgagctgggctggctggagagaacaaagtctgacctgagccacctgatgggcaggcgcgaggagggagcaaccatcggctttagcatggacatcgatctgaggccagcatccgcctgggcaatctacgccgccctgacaaccttcatcacaccagcagtgcagcacgcagtgacaaccagctacaacaattattccctgatggctatggccacccaggcaggcgtgctgttcggaatgggcaagggcatgcctttttacgcctgggacttcggcgtgccactgctgatgatcggctgctatagccagctgacaccactgaccctgatcgtggccatcatcctgctggtggcccactacatgtatctgatccccggcctgcaggccgccgccgccagagccgcccagaagagaacagccgccggcatcatgaagaaccctgtggtggatggcatcgtggtgaccgacatcgatacaatgaccatcgacccacaggtggagaagaagatgggacaggtgctgctgatcgcagtggccgtgtcctctgccatcctgtccagaacagcatggggatggggagaggcaggcgccctgatcaccgccgccacatctaccctgtgggagggcagccccaataagtactggaacagctccacagccaccagcctgtgcaacatctttcgcggctcctacctggcaggagcctctctgatctatacagtgacccggaatgcaggcctggtgaagaggagaggaggaggcacaggagagacactgggagagaagtggaaggccaggctgaaccagatgtccgccctggagttctacagctataagaagtccggcatcacagaggtgtgccgcgaggaggccaggcgcgccctgaaggatggcgtggcaaccggaggacacgccgtgagccggggcagcgccaagctgaggtggctggtggagaggggctacctgcagccctacggcaaagtgatcgacctgggatgtggccgcggaggatggagctactatgtggcaaccatccggaaggtgcaggaggtgaagggctacacaaagggaggcccaggccacgaggagcccgtgctggtgcagagctatggctggaatatcgtgagacttaagagcggagtggacgtgttccacatggcagcagagccatgcgatacactgctgtgcgacatcggcgagtctagctcctctccagaggtggaggaggcaaggaccctgcgcgtgctgagcatggtgggcgactggctggagaagcgcccaggcgccttctgcatcaaggtgctgtgcccctacacatccaccatgatggagacactggagcggctgcagcggagatatggaggaggcctggtgcgggtgccactgagcagaaactccacacacgagatgtactgggtgtctggcgccaagagcaataccatcaagtctgtgagcacaaccagccagctgctgctgggaaggatggatggaccaaggcgccctgtgaagtatgaggaggacgtgaacctgggctccggcacccgcgccgtggtgtcttgcgccgaggcccccaatatgaagatcatcggcaaccggatcgagcggatcagaagcgagcacgccgagacatggttctttgacgagaaccacccctacagaacatgggcctaccacggcagctatgaggcacctacccagggctccgccagctccctgatcaatggcgtggtgaggctgctgagcaagccctgggatgtggtgacaggcgtgaccggcatcgccatgaccgacacaaccccttatggccagcagagggtgtttaaggagaaggtggatacccgcgtgcctgacccacaggagggcacacggcaggtcatgagcatggtgtctagctggctgtggaaggagctgggcaagcacaagcggcccagagtgtgcacaaaggaggagtttatcaataaggtgcgctccaacgccgccctgggagcaatcttcgaggaggagaaggagtggaagaccgccgtggaggccgtgaacgatccacggttctgggccctggtggacaaggagagggagcaccacctgaggggagagtgccagtcctgcgtgtacaatatgatgggcaagagggagaagaagcagggcgagtttggcaaggccaagggctctcgcgccatctggtatatgtggctgggcgcccggttcctggagtttgaggccctgggcttcctgaacgaggaccactggatgggaagagagaacagcggaggaggagtggagggcctgggcctgcagaggctgggctacgtgctggaggagatgagcagaatccccggcggccggatgtatgccgacgataccgccggctgggatacacggatctccagatttgacctggagaatgaggccctgatcaccaaccagatggagaagggacacagagccctggccctggccatcatcaagtacacatatcagaacaaggtggtgaaggtgctgaggcctgccgagaagggcaagaccgtgatggacatcatcagcaggcaggaccagaggggctccggacaggtggtgacctacgccctgaatacattcaccaacctggtggtgcagctgatccggaatatggaggccgaggaggtgctggagatgcaggatctgtggctgctgcggagatctgagaaggtgaccaattggctgcagagcaacggctgggacaggctgaagaggatggccgtgagcggcgacgattgcgtggtgaagcccatcgacgataggtttgcccacgccctgcgcttcctgaacgatatgggcaaggtgcgcaaggacacccaggagtggaagccttctacaggctgggataactgggaggaggtgccattttgcagccaccacttcaataagctgcacctgaaggatggccggtccatcgtggtgccttgtagacaccaggacgagctgatcggaagggcccgcgtgagcccaggcgcaggctggtccatccgggagacagcctgcctggccaagtcctacgcccagatgtggcagctgctgtatttccacaggcgcgatctgagactgatggccaatgccatctgttcctctgtgcctgtggactgggtgccaaccggcaggacaacctggagcatccacggcaagggcgagtggatgacaaccgaggacatgctggtggtgtggaatcgcgtgtggatcgaggagaacgatcacatggaggacaagacaccagtgaccaagtggacagacatcccctacctgggcaagagggaggacctgtggtgcggcagcctgatcggacacaggccaagaacaacctgggcagagaacatcaagaataccgtgaacatggtgcggagaatcatcggcgatgaggagaagtatatggactatctgtccactcaggtccgctatctgggcgaagaaggctcaactcccggcgtgctgtaa

SEQ ID NO: 76 - RNA, 10735 nt, synthetic construct
  source 1..10735: mol_type = other RNA
agttgttagtctacgtggaccgacaagaacagtttcgaatcggaagcttgcttaacgtagttctaacagttttttattagagagcagatctctgatgaacaaccaacggaaaaagacgggtcgaccgtctttcaatatgctgaaacgcgcgagaaaccgcgtgtcaactgtgagccagctggccaagcggttctctaagggcctgctgagcggacagggaccaatgaagctggtcatggccttcatcgcctttctgagattcctggcaatcccacctaccgcaggcatcctggccagatggggcagcttcaagaagaacggcgccatcaaggtgctgagaggctttaagaaggagatcagcaacatgctgaatatcatgaaccggagaaagaggtctgtgaccatgctgctgatgctgctgcctacagccctggccttccacctgaccacacgcggcggagagccacacatgatcgtgtccaagcaggagcggggcaagtctctgctgtttaagaccagcgccggcgtgaatatgtgcacactgatcgctatggacctgggcgagctgtgcgaggatacaatgacctacaagtgtccaagaatcacagagacagagcccgacgatgtggactgctggtgtaacgccacagagacatgggtgacctatggcacatgttctcagaccggcgagcacaggcgcgataagagaagcgtggccctggcccctcacgtgggcctgggcctggagacaaggaccgagacatggatgagcagcgagggcgcctggaagcagatccagaaggtggagacatgggccctgaggcacccaggctttacagtgatcgccctgttcctggcacacgcaatcggcaccagcatcacacagaagggcatcatcttcatcctgctgatgctggtgacccccagcatggccatgagatgcgtgggcatcggcaaccgcgactttgtggagggcctgtctggagcaacctgggtggatgtggtgctggagcacggcagctgcgtgaccacaatggccaaggacaagcccaccctggacatcgagctgctgaagactgaggtgacaaatcctgccgtgctgcgcaagctgtgcatcgaggccaagatcagcaacaccacaaccgactctcggtgtccaacacagggagaggccaccctggtggaagagcaggacaccaatttcgtgtgccggcggaccttcgtggacagaggatggggaaacggatgtggcctgttcggcaagggctctctgatcacctgcgccaagtttaagtgcgtgacaaagctggagggcaagatcgtgcagtacgagaatctgaagtatagcgtgatcgtgaccgtgcacacaggcgaccagcaccaagtgggcaacgagacaaccgagcacggcacaaccgccaccatcacaccacaggcccccacatccgagatccagctgaccgactacggcgccctgacactggattgctctcctcgcacaggcctggatttcaatgagatggtgctgctgacaatggagaagaagagctggctggtgcacaagcagtggtttctggacctgccactgccttggaccagcggagccagcacatcccaggagacatggaaccggcaggatctgctggtgaccttcaagacagcccacgccaagaagcaggaggtggtggtgctgggctcccaggagggagcaatgcacaccgccctgacaggagccaccgagatccagacctctggcacaaccacaatcttcgccggccacctgaagtgcagacttaagatggacaagctgaccctgaagggcatgtcttacgtgatgtgcaccggcagctttaagctggagaaggaggtggccgagacacagcacggcaccgtgctggtgcaggtgaagtatgagggcaccgacgccccctgtaagatccctttctctagccaggatgagaagggcgtgacacagaatggcagactgatcaccgccaaccctatcgtgacagataaggagaagccagtgaatatcgaggccgagccaccctttggcgagtcctatatcgtggtgggagcaggagagaaggccctgaagctgtcttggttcaagaagggctcctctatcggcaagatgtttgaggcaaccgccaggggcgccaggaggatggccatcctgggcgacacagcctgggatttcggctccatcggcggcgtgtttacctctgtgggcaagctgatccaccagattttcggcacagcgtacggcgtgctgttttctggcgtgagctggaccatgaagatcggcatcggcatcctgctgacatggctgggcctgaactctaggagcacatccctgtctatgacctgcatcgccgtgggcatggtgaccctgtatctgggcgtgatggtgcaggcagacagcggatgcgtgatcaattggaagggcagagagctgaagtgtggctccggcatcttcgtgaccaacgaggtgcacacctggacagagcagtacaagtttcaggccgattcccccaagaggctgtctgccgcaatcggcaaggcctgggaggagtcagtgtgcggcatcaggtccgccacccgcctggagaatatcatgtggaagcagatcagcaatgagctgaaccacatcctgctggagaacgacatgaagttcacagtggtggtgggcgatgtgagcggcatcctggcacagggcaagaagatgatccgcccacagcctatggagcacaagtactcctggaagtcttggggcaaggccaagatcatcggcgccgatgtacagaataccaccttcatcatcgatggccctaacaccccagagtgccccgacaatcagcgggcctggaacatctgggaggtggaggactacggctttggcatcttcaccacaaatatctggctgaagctgagagactcctatacccaggtgtgcgatcacaggctgatgagcgccgccatcaaggactccaaggccgtgcacgccgatatgggctattggatcgagagcgagaagaacgagacatggaagctggccagagcctccttcatcgaggtgaagacctgcatctggcccaagagccacacactgtggtccaatggcgtgctggagagcgagatgatcatccctaaaatctacggcggcccaatctcccagcacaactacaggccaggctatttcacccagacagcaggaccctggcacctgggcaagctggagctggactttgatctgtgcgagggtaccacagtggtggtggacgagcactgtggcaatcggggccccagcctgagaaccacaaccgtgacaggcaagaccatccacgagtggtgctgtaggtcctgcaccctgcctccactgcgcttcaagggcgaggacggctgttggtacggcatggagatccgccctgtgaaggagaaggaggagaacctggtgaagagcatggtgtccgccggctctggagaggtggatagcttctccctgggcctgctgtgcatcagcatcatgatcgaggaagtgatgcggagcagatggtcccgcaagatgctgatgaccggcacactggccgtgtttctgctgctgacaatgggccagctgacctggaatgacctgatccggctgtgcatcatggtgggcgccaacgcctccgataagatgggcatgggcacaacctatctggccctgatggccacctttaggatgcgccctatgttcgccgtgggcctgctgtttcggagactgaccagccgggaggtgctgctgctgacagtgggcctgtccctggtggcctctgtggagctgccaaactccctggaggagctgggcgacgggctggcaatggggatcatgatgctgaagctgctgaccgatttccagtcccaccagctgtgggccacactgctgtctctgacctttgtgaagacaaccttcagcctgcactacgcctggaagacaatggccatgatcctgtctatcgtgagcctgttcccactgtgcctgtccacaacctctcagaagacaacctggctgccagtgctgctgggcagcctgggctgtaagcccctgacaatgtttctgatcaccgagaacaagatttggggaaggaagagctggcccctgaacgagggcatcatggccgtgggcatcgtgtccatcctgctgagcagcctgctgaagaatgacgtgccactggccggaccactgatcgcaggaggcatgctgatcgcctgctatgtgatcagcggctctagcgccgatctgtccctggagaaggcagcagaggtgtcctgggaggaggaggcagagcacagcggagcctcccacaacatcctggtggaggtgcaggacgatggcaccatgaagatcaaggacgaggagcgggacgataccctgacaatcctgctgaaggccaccctgctggccatctctggcgtgtaccctatgagcatcccagccacactgttcgtgtggtatttctggcagaagaagaagcagcgcagcggcgtgctgtgggataccccttccccacctgaggtggagagggccgtgctggacgatggaatctacagaatcctgcagagaggcctgctgggcagaagccaggtcggagtgggcgtgtttcaggagggcgtgttccacacaatgtggcacgtgacccgcggcgccgtgctgatgtaccagggcaagcggctggagccatcttgggccagcgtgaagaaggacctgatcagctatggcggaggatggaggttccagggatcctggaacgcaggagaggaggtgcaggtcatcgcagtggagcccggcaagaatcctaagaacgtgcagaccgcccccggcacattcaagacccctgagggagaagtgggagcaatcgccctggacttcaagccaggcacatctggcagccccatcgtgaatagagagggcaagatcgtgggcctgtacggcaacggcgtggtgacaacctctggcacctatgtgagcgccatcgcacaggcaaaggcctcccaggagggacctctgccagagatcgaggacgaggtgtttcggaagagaaatctgacaatcatggatctgcaccctggctctggcaagaccaggcgctatctgccagcaatcgtgcgggaggcaatcaggagaaacgtgagaaccctggtgctggccccaacaagggtggtggcctccgagatggcagaggccctgaagggcatgcccatcagataccagacaaccgccgtgaagtctgagcacaccggcaaggagatcgtggacctgatgtgccacgccaccttcacaatgaggctgctgagcccagtgcgcgtgcccaactacaatatgatcatcatggacgaggcccactttaccgatcccgcctctatcgccgccagaggctatatcagcacaagagtgggcatgggcgaggctgccgccatcttcatgaccgcaacaccacccggctctgtggaggcctttccacagagcaatgccgtgatccaggacgaggagagggacatccccgagcggagctggaactctggctacgactggatcaccgatttccccggcaagacagtgtggtttgtgcctagcatcaagtccggcaatgacatcgccaactgcctgcggaagaatggcaagagagtggtgcagctgagccgcaagacattcgacaccgagtaccagaagaccaagaacaatgactgggattatgtggtgacaaccgacatctccgagatgggcgccaactttcgggcagacagagtgatcgatccccggcggtgcctgaagccagtgatcctgaaggatggacctgagagagtgatcctggcaggaccaatgcctgtgaccgtggccagcgccgcacagcggagaggcaggatcggccgcaaccagaataaggagggcgaccagtacatctatatgggccagccactgaacaatgacgaggatcacgcccactggacagaggccaagatgctgctggataacatcaatacccccgagggcatcatccctgccctgttcgagccagagagagagaagagcgccgcaatcgacggagagtacaggctgcgcggagaggccaggaagacctttgtggagctgatgaggaggggcgatctgcccgtgtggctgtcctacaaggtggcctctgagggcttccagtattccgaccggagatggtgctttgatggcgagagaaacaatcaggtgctggaggagaatatggacgtggagatttggaccaaggagggcgagaggaagaagctgcggcccagatggctggacgcacgcacatatagcgatcctctggccctgcgggagtttaaggagttcgcagcaggcaggcgctccgtgtctggcgacctgatcctggagatcggcaagctgccacagcacctgacccagcgcgcccagaatgccctggataacctggtcatgctgcacaactccgagcagggaggcaaggcctacaggcacgctatggaggagctgcctgacacaatcgagacactgatgctgctggccctgatcgccgtgctgacaggaggcgtgaccctgttctttctgtccggcagaggcctgggcaagacctctatcggcctgctgtgcgtgatcgcctcctctgccctgctgtggatggcctccgtggagccacactggatcgcagcctctatcatcctggagttctttctgatggtgctgctgatcccagagccagacaggcagcgcacccctcaggataatcagctagcctacgtggtcatcggcctgctgttcatgatcctgacagctgccgccaacgagatgggcctgctggagacaaccaagaaggacctgggcatcggacacgctgccgccgagaatcaccaccacgcagccatgctggacgtggatctgcaccctgccagcgcctggaccctgtacgcagtggcaacaaccatcatcaccccaatgatgaggcacacaatcgagaatacaaccgccaacatctccctgacagccatcgccaatcaggccgccatcctgatgggcctggataagggctggcctatctctaagatggacatcggcgtgccactgctggccctgggctgctacagccaggtgaacccactgaccctgacagccgccgtgttcatgctggtggcccactatgccatcatcggccccggcctgcaggcaaaggcaaccagggaggcacagaagcgcacagcagcaggcatcatgaagaacccaaccgtggacggcatcgtggccatcgacctggaccccgtggtgtacgatgccaagttcgagaagcagctgggccagatcatgctgctgatcctgtgcacctctcagatcctgctgatgcgcacaacctgggccctgtgcgagagcatcacactggccaccggaccactgacaaccctgtgggagggcagccctggcaagttttggaatacaaccatcgccgtgagcatggccaacatcttccgcggctcctatctggcaggagcaggcctggcctttagcctgatgaagtccctgggcggcggccggagaggcaccggcgcccagggcgagacactgggcgagaagtggaagcggcagctgaatcagctgagcaagtccgagttcaacacctacaagcggagcggcatcatcgaggtggaccggagcgaggcaaaggagggcctgaagagaggcgagccaaccaagcacgccgtgtctaggggcacagccaagctgcggtggtttgtggagagaaacctggtgaagcccgagggcaaagtgatcgacctgggctgcggccggggaggatggtcctactattgtgccggcctgaagaaggtgaccgaggtgaagggctacacaaagggaggccctggccacgaggagcctatcccaatggccacctacggctggaatctggtgaagctgtatagcggcaaggacgtgttctttacccctccagagaagtgcgacacactgctgtgcgacatcggcgagagcagccccaaccctaccatcgaggagggccggacactgagagtgctgaagatggtggagccctggctgagaggcaatcagttctgcatcaagatcctgaacccttacatgccaagcgtggtggagacactggagcagatgcagaggaagcacggcggcatgctggtgaggaatcccctgtctcgcaacagcacccacgagatgtattgggtgtcctgtggcacaggcaatatcgtgtccgccgtgaacatgacctctcggatgctgctgaatcggttcacaatggcccacaggaagcctacatacgagcgcgacgtggatctgggcgcaggcacccgccacgtggcagtggagccagaggtggccaacctggacatcatcggccagcggatcgagaatatcaagaacggccacaagtctacatggcactacgacgaggataatccttataagacctgggcctaccacggcagctatgaggtgaagccatctggcagcgcctctagcatggtgaacggcgtggtgagactgctgaccaagccctgggacgtgatccctatggtgacacagatcgccatgaccgatacaacccccttcggccagcagagggtgtttaaggagaaggtggacacccggacacctaaggccaagagaggcaccgcccagatcatggaggtgacagccagatggctgtggggcttcctgagcaggaataagaagccaaggatctgcacacgcgaggagttcaccaggaaggtgcgctccaacgcagcaatcggagccgtgtttgtggatgagaatcagtggaactctgccaaggaggccgtggaggacgagcggttctgggatctggtgcaccgggagagagagctgcacaagcagggcaagtgcgccacctgcgtgtataacatgatgggcaagcgggagaagaagctgggcgagtttggcaaggcaaagggctcccgcgccatctggtatatgtggctgggcgcccggtttctggagttcgaggccctgggcttcatgaatgaggaccactggttttctcgcgagaactccctgtctggagtggagggagagggcctgcacaagctgggctacatcctgcgggacatcagcaagatccctggcggcaatatgtatgcagacgataccgcaggatgggacacacgcatcaccgaggacgatctgcagaacgaggccaagatcacagacatcatggagcctgagcacgccctgctggccaccagcatcttcaagctgacatatcagaataaggtggtgcgggtgcagcggcccgcaaagaacggcaccgtgatggacgtgatctccaggcgcgatcagaggggctctggacaagtgggcacatacggcctgaataccttcacaaacatggaggcccagctgatcagacagatggagagcgagggcatctttagcccctccgagctggagacacctaacctggccgagagggtgctggactggctgaagaagcacggcacagagaggctgaagcgcatggccatctccggcgacgattgcgtggtgaagcccatcgacgatagattcgccacagccctgaccgccctgaatgacatgggcaaggtgaggaaggacatccctcagtgggagccatctaagggctggaacgattggcagcaggtgcccttttgcagccaccacttccaccagctgatcatgaaggacggccgggagatcgtggtgccttgtagaaatcaggatgagctggtgggaagggcccgcgtgagccagggagcaggctggtccctgcgggagacagcctgcctaggcaagtcctacgcccagatgtggcagctgatgtattttcacaggcgggacctgcggctggccgcaaacgccatctgttctgccgtgccagtggattgggtgcccaccagccggacaacctggtccatccacgcccaccaccagtggatgacaaccgaggacatgctgagcgtgtggaatagagtgtggatcgaggagaacccctggatggaggataagacccacgtgtcctcttgggaggacgtgccttatctgggcaagcgggaggatagatggtgtggctccctgatcggcctgacagccagggccacatgggcaaccaatatccaggtggccatcaaccaggtgaggcgcctgatcggcaacgagaattacctggattttatgacatctatgaagcggtttaagaacgagtccgacccagaaggagcactgtggtgagccaactcattcacaaaataaaggaaaataaaaaatcaaacaaggcaagaagtcaggccggattaagccatagcacggtaagagctatgctgcctgtgagccccgtccaaggacgtaaaatgaagtcaggccgaaagccacggttcgagcaagccgtgctgcctgtagctccatcgtggggatgtaaaaacccgggaggctgcaaaccatggaagctgtacgcatggggtagcagactagtggttagaggagacccctcccaagacacaacgcagcagcggggcccaacaccaggggaagctgtaccctggtggtaaggactagaggttagaggagaccccccgcacaacaacaaacagcatattgacgctgggagagaccagagatcctgctgtctctacagcatcattccaggcacagaacgccaaaaaatggaatggtgctgttgaatcaacaggttct

SEQ ID NO: 77 - RNA, 10179 nt, synthetic construct
  source 1..10179: mol_type = other RNA
atgaacaaccaacggaaaaagacgggtcgaccgtctttcaatatgctgaaacgcgcgagaaaccgcgtgtcaactgtgagccagctggccaagcggttctctaagggcctgctgagcggacagggaccaatgaagctggtcatggccttcatcgcctttctgagattcctggcaatcccacctaccgcaggcatcctggccagatggggcagcttcaagaagaacggcgccatcaaggtgctgagaggctttaagaaggagatcagcaacatgctgaatatcatgaaccggagaaagaggtctgtgaccatgctgctgatgctgctgcctacagccctggccttccacctgaccacacgcggcggagagccacacatgatcgtgtccaagcaggagcggggcaagtctctgctgtttaagaccagcgccggcgtgaatatgtgcacactgatcgctatggacctgggcgagctgtgcgaggatacaatgacctacaagtgtccaagaatcacagagacagagcccgacgatgtggactgctggtgtaacgccacagagacatgggtgacctatggcacatgttctcagaccggcgagcacaggcgcgataagagaagcgtggccctggcccctcacgtgggcctgggcctggagacaaggaccgagacatggatgagcagcgagggcgcctggaagcagatccagaaggtggagacatgggccctgaggcacccaggctttacagtgatcgccctgttcctggcacacgcaatcggcaccagcatcacacagaagggcatcatcttcatcctgctgatgctggtgacccccagcatggccatgagatgcgtgggcatcggcaaccgcgactttgtggagggcctgtctggagcaacctgggtggatgtggtgctggagcacggcagctgcgtgaccacaatggccaaggacaagcccaccctggacatcgagctgctgaagactgaggtgacaaatcctgccgtgctgcgcaagctgtgcatcgaggccaagatcagcaacaccacaaccgactctcggtgtccaacacagggagaggccaccctggtggaagagcaggacaccaatttcgtgtgccggcggaccttcgtggacagaggatggggaaacggatgtggcctgttcggcaagggctctctgatcacctgcgccaagtttaagtgcgtgacaaagctggagggcaagatcgtgcagtacgagaatctgaagtatagcgtgatcgtgaccgtgcacacaggcgaccagcaccaagtgggcaacgagacaaccgagcacggcacaaccgccaccatcacaccacaggcccccacatccgagatccagctgaccgactacggcgccctgacactggattgctctcctcgcacaggcctggatttcaatgagatggtgctgctgacaatggagaagaagagctggctggtgcacaagcagtggtttctggacctgccactgccttggaccagcggagccagcacatcccaggagacatggaaccggcaggatctgctggtgaccttcaagacagcccacgccaagaagcaggaggtggtggtgctgggctcccaggagggagcaatgcacaccgccctgacaggagccaccgagatccagacctctggcacaaccacaatcttcgccggccacctgaagtgcagacttaagatggacaagctgaccctgaagggcatgtcttacgtgatgtgcaccggcagctttaagctggagaaggaggtggccgagacacagcacggcaccgtgctggtgcaggtgaagtatgagggcaccgacgccccctgtaagatccctttctctagccaggatgagaagggcgtgacacagaatggcagactgatcaccgccaaccctatcgtgacagataaggagaagccagtgaatatcgaggccgagccaccctttggcgagtcctatatcgtggtgggagcaggagagaaggccctgaagctgtcttggttcaagaagggctcctctatcggcaagatgtttgaggcaaccgccaggggcgccaggaggatggccatcctgggcgacacagcctgggatttcggctccatcggcggcgtgtttacctctgtgggcaagctgatccaccagattttcggcacagcgtacggcgtgctgttttctggcgtgagctggaccatgaagatcggcatcggcatcctgctgacatggctgggcctgaactctaggagcacatccctgtctatgacctgcatcgccgtgggcatggtgaccctgtatctgggcgtgatggtgcaggcagacagcggatgcgtgatcaattggaagggcagagagctgaagtgtggctccggcatcttcgtgaccaacgaggtgcacacctggacagagcagtacaagtttcaggccgattcccccaagaggctgtctgccgcaatcggcaaggcctgggaggagtcagtgtgcggcatcaggtccgccacccgcctggagaatatcatgtggaagcagatcagcaatgagctgaaccacatcctgctggagaacgacatgaagttcacagtggtggtgggcgatgtgagcggcatcctggcacagggcaagaagatgatccgcccacagcctatggagcacaagtactcctggaagtcttggggcaaggccaagatcatcggcgccgatgtacagaataccaccttcatcatcgatggccctaacaccccagagtgccccgacaatcagcgggcctggaacatctgggaggtggaggactacggctttggcatcttcaccacaaatatctggctgaagctgagagactcctatacccaggtgtgcgatcacaggctgatgagcgccgccatcaaggactccaaggccgtgcacgccgatatgggctattggatcgagagcgagaagaacgagacatggaagctggccagagcctccttcatcgaggtgaagacctgcatctggcccaagagccacacactgtggtccaatggcgtgctggagagcgagatgatcatccctaaaatctacggcggcccaatctcccagcacaactacaggccaggctatttcacccagacagcaggaccctggcacctgggcaagctggagctggactttgatctgtgcgagggtaccacagtggtggtggacgagcactgtggcaatcggggccccagcctgagaaccacaaccgtgacaggcaagaccatccacgagtggtgctgtaggtcctgcaccctgcctccactgcgcttcaagggcgaggacggctgttggtacggcatggagatccgccctgtgaaggagaaggaggagaacctggtgaagagcatggtgtccgccggctctggagaggtggatagcttctccctgggcctgctgtgcatcagcatcatgatcgaggaagtgatgcggagcagatggtcccgcaagatgctgatgaccggcacactggccgtgtttctgctgctgacaatgggccagctgacctggaatgacctgatccggctgtgcatcatggtgggcgccaacgcctccgataagatgggcatgggcacaacctatctggccctgatggccacctttaggatgcgccctatgttcgccgtgggcctgctgtttcggagactgaccagccgggaggtgctgctgctgacagtgggcctgtccctggtggcctctgtggagctgccaaactccctggaggagctgggcgacgggctggcaatggggatcatgatgctgaagctgctgaccgatttccagtcccaccagctgtgggccacactgctgtctctgacctttgtgaagacaaccttcagcctgcactacgcctggaagacaatggccatgatcctgtctatcgtgagcctgttcccactgtgcctgtccacaacctctcagaagacaacctggctgccagtgctgctgggcagcctgggctgtaagcccctgacaatgtttctgatcaccgagaacaagatttggggaaggaagagctggcccctgaacgagggcatcatggccgtgggcatcgtgtccatcctgctgagcagcctgctgaagaatgacgtgccactggccggaccactgatcgcaggaggcatgctgatcgcctgctatgtgatcagcggctctagcgccgatctgtccctggagaaggcagcagaggtgtcctgggaggaggaggcagagcacagcggagcctcccacaacatcctggtggaggtgcaggacgatggcaccatgaagatcaaggacgaggagcgggacgataccctgacaatcctgctgaaggccaccctgctggccatctctggcgtgtaccctatgagcatcccagccacactgttcgtgtggtatttctggcagaagaagaagcagcgcagcggcgtgctgtgggataccccttccccacctgaggtggagagggccgtgctggacgatggaatctacagaatcctgcagagaggcctgctgggcagaagccaggtcggagtgggcgtgtttcaggagggcgtgttccacacaatgtggcacgtgacccgcggcgccgtgctgatgtaccagggcaagcggctggagccatcttgggccagcgtgaagaaggacctgatcagctatggcggaggatggaggttccagggatcctggaacgcaggagaggaggtgcaggtcatcgcagtggagcccggcaagaatcctaagaacgtgcagaccgcccccggcacattcaagacccctgagggagaagtgggagcaatcgccctggacttcaagccaggcacatctggcagccccatcgtgaatagagagggcaagatcgtgggcctgtacggcaacggcgtggtgacaacctctggcacctatgtgagcgccatcgcacaggcaaaggcctcccaggagggacctctgccagagatcgaggacgaggtgtttcggaagagaaatctgacaatcatggatctgcaccctggctctggcaagaccaggcgctatctgccagcaatcgtgcgggaggcaatcaggagaaacgtgagaaccctggtgctggccccaacaagggtggtggcctccgagatggcagaggccctgaagggcatgcccatcagataccagacaaccgccgtgaagtctgagcacaccggcaaggagatcgtggacctgatgtgccacgccaccttcacaatgaggctgctgagcccagtgcgcgtgcccaactacaatatgatcatcatggacgaggcccactttaccgatcccgcctctatcgccgccagaggctatatcagcacaagagtgggcatgggcgaggctgccgccatcttcatgaccgcaacaccacccggctctgtggaggcctttccacagagcaatgccgtgatccaggacgaggagagggacatccccgagcggagctggaactctggctacgactggatcaccgatttccccggcaagacagtgtggtttgtgcctagcatcaagtccggcaatgacatcgccaactgcctgcggaagaatggcaagagagtggtgcagctgagccgcaagacattcgacaccgagtaccagaagaccaagaacaatgactgggattatgtggtgacaaccgacatctccgagatgggcgccaactttcgggcagacagagtgatcgatccccggcggtgcctgaagccagtgatcctgaaggatggacctgagagagtgatcctggcaggaccaatgcctgtgaccgtggccagcgccgcacagcggagaggcaggatcggccgcaaccagaataaggagggcgaccagtacatctatatgggccagccactgaacaatgacgaggatcacgcccactggacagaggccaagatgctgctggataacatcaatacccccgagggcatcatccctgccctgttcgagccagagagagagaagagcgccgcaatcgacggagagtacaggctgcgcggagaggccaggaagacctttgtggagctgatgaggaggggcgatctgcccgtgtggctgtcctacaaggtggcctctgagggcttccagtattccgaccggagatggtgctttgatggcgagagaaacaatcaggtgctggaggagaatatggacgtggagatttggaccaaggagggcgagaggaagaagctgcggcccagatggctggacgcacgcacatatagcgatcctctggccctgcgggagtttaaggagttcgcagcaggcaggcgctccgtgtctggcgacctgatcctggagatcggcaagctgccacagcacctgacccagcgcgcccagaatgccctggataacctggtcatgctgcacaactccgagcagggaggcaaggcctacaggcacgctatggaggagctgcctgacacaatcgagacactgatgctgctggccctgatcgccgtgctgacaggaggcgtgaccctgttctttctgtccggcagaggcctgggcaagacctctatcggcctgctgtgcgtgatcgcctcctctgccctgctgtggatggcctccgtggagccacactggatcgcagcctctatcatcctggagttctttctgatggtgctgctgatcccagagccagacaggcagcgcacccctcaggataatcagctagcctacgtggtcatcggcctgctgttcatgatcctgacagctgccgccaacgagatgggcctgctggagacaaccaagaaggacctgggcatcggacacgctgccgccgagaatcaccaccacgcagccatgctggacgtggatctgcaccctgccagcgcctggaccctgtacgcagtggcaacaaccatcatcaccccaatgatgaggcacacaatcgagaatacaaccgccaacatctccctgacagccatcgccaatcaggccgccatcctgatgggcctggataagggctggcctatctctaagatggacatcggcgtgccactgctggccctgggctgctacagccaggtgaacccactgaccctgacagccgccgtgttcatgctggtggcccactatgccatcatcggccccggcctgcaggcaaaggcaaccagggaggcacagaagcgcacagcagcaggcatcatgaagaacccaaccgtggacggcatcgtggccatcgacctggaccccgtggtgtacgatgccaagttcgagaagcagctgggccagatcatgctgctgatcctgtgcacctctcagatcctgctgatgcgcacaacctgggccctgtgcgagagcatcacactggccaccggaccactgacaaccctgtgggagggcagccctggcaagttttggaatacaaccatcgccgtgagcatggccaacatcttccgcggctcctatctggcaggagcaggcctggcctttagcctgatgaagtccctgggcggcggccggagaggcaccggcgcccagggcgagacactgggcgagaagtggaagcggcagctgaatcagctgagcaagtccgagttcaacacctacaagcggagcggcatcatcgaggtggaccggagcgaggcaaaggagggcctgaagagaggcgagccaaccaagcacgccgtgtctaggggcacagccaagctgcggtggtttgtggagagaaacctggtgaagcccgagggcaaagtgatcgacctgggctgcggccggggaggatggtcctactattgtgccggcctgaagaaggtgaccgaggtgaagggctacacaaagggaggccctggccacgaggagcctatcccaatggccacctacggctggaatctggtgaagctgtatagcggcaaggacgtgttctttacccctccagagaagtgcgacacactgctgtgcgacatcggcgagagcagccccaaccctaccatcgaggagggccggacactgagagtgctgaagatggtggagccctggctgagaggcaatcagttctgcatcaagatcctgaacccttacatgccaagcgtggtggagacactggagcagatgcagaggaagcacggcggcatgctggtgaggaatcccctgtctcgcaacagcacccacgagatgtattgggtgtcctgtggcacaggcaatatcgtgtccgccgtgaacatgacctctcggatgctgctgaatcggttcacaatggcccacaggaagcctacatacgagcgcgacgtggatctgggcgcaggcacccgccacgtggcagtggagccagaggtggccaacctggacatcatcggccagcggatcgagaatatcaagaacggccacaagtctacatggcactacgacgaggataatccttataagacctgggcctaccacggcagctatgaggtgaagccatctggcagcgcctctagcatggtgaacggcgtggtgagactgctgaccaagccctgggacgtgatccctatggtgacacagatcgccatgaccgatacaacccccttcggccagcagagggtgtttaaggagaaggtggacacccggacacctaaggccaagagaggcaccgcccagatcatggaggtgacagccagatggctgtggggcttcctgagcaggaataagaagccaaggatctgcacacgcgaggagttcaccaggaaggtgcgctccaacgcagcaatcggagccgtgtttgtggatgagaatcagtggaactctgccaaggaggccgtggaggacgagcggttctgggatctggtgcaccgggagagagagctgcacaagcagggcaagtgcgccacctgcgtgtataacatgatgggcaagcgggagaagaagctgggcgagtttggcaaggcaaagggctcccgcgccatctggtatatgtggctgggcgcccggtttctggagttcgaggccctgggcttcatgaatgaggaccactggttttctcgcgagaactccctgtctggagtggagggagagggcctgcacaagctgggctacatcctgcgggacatcagcaagatccctggcggcaatatgtatgcagacgataccgcaggatgggacacacgcatcaccgaggacgatctgcagaacgaggccaagatcacagacatcatggagcctgagcacgccctgctggccaccagcatcttcaagctgacatatcagaataaggtggtgcgggtgcagcggcccgcaaagaacggcaccgtgatggacgtgatctccaggcgcgatcagaggggctctggacaagtgggcacatacggcctgaataccttcacaaacatggaggcccagctgatcagacagatggagagcgagggcatctttagcccctccgagctggagacacctaacctggccgagagggtgctggactggctgaagaagcacggcacagagaggctgaagcgcatggccatctccggcgacgattgcgtggtgaagcccatcgacgatagattcgccacagccctgaccgccctgaatgacatgggcaaggtgaggaaggacatccctcagtgggagccatctaagggctggaacgattggcagcaggtgcccttttgcagccaccacttccaccagctgatcatgaaggacggccgggagatcgtggtgccttgtagaaatcaggatgagctggtgggaagggcccgcgtgagccagggagcaggctggtccctgcgggagacagcctgcctaggcaagtcctacgcccagatgtggcagctgatgtattttcacaggcgggacctgcggctggccgcaaacgccatctgttctgccgtgccagtggattgggtgcccaccagccggacaacctggtccatccacgcccaccaccagtggatgacaaccgaggacatgctgagcgtgtggaatagagtgtggatcgaggagaacccctggatggaggataagacccacgtgtcctcttgggaggacgtgccttatctgggcaagcgggaggatagatggtgtggctccctgatcggcctgacagccagggccacatgggcaaccaatatccaggtggccatcaaccaggtgaggcgcctgatcggcaacgagaattacctggattttatgacatctatgaagcggtttaagaacgagtccgacccagaaggagcactgtggtga

SEQ ID NO: 78 - RNA, 10707 nt, synthetic construct
  source 1..10707: mol_type = other RNA
agttgttagtctacgtggaccgacaagaacagtttcgactcggaagcttgcttaacgtagtgctgacagttttttattagagagcagatttctgatgaacaaccaacgaaaaaagacgggaaaaccgtctatcaatatgctgaaacgcgtgagaaaccgtgtgtcaactggctcacagctggccaagcggttctccagaggcctgctgaacggacagggacccatgaagctggtcatggccttcatcgcctttctgcgcttcctggcaatcccacctacagcaggcgtgctggccagatggggcacctttaagaagagcggcgccatcaaggtgctgaagggcttcaagaaggagatctccaacatgctgtctatcatcaataagcgcaagaagaccagcctgtgcctgatgatgatgctgcctgccacactggcctttcacctgaccagccgggacggcgagccaagaatgatcgtgggcaagaacgagcggggcaagtctctgctgttcaagaccgccagcggcatcaatatgtgcaccctgatcgccatggatctgggcgagatgtgcgacgataccgtgacatacaagtgtcctctgatcgccgaggtggagccagaggatatcgactgctggtgtaacctgaccagcacatgggtgacatatggcacctgcaatcaggcaggagagcacaggagagacaagcggagcgtggccctggccccacacgtgggaatgggcctggatacccggacacagacctggatgtctgccgagggagcatggaggcaggtggagaaggtggagacatgggccctgagacaccccgggtttaccatcctggccctgttcctggcccactacatcggcacatctctgacccagaaggtggtcatcttcatcctgctgatgctggtgacccctagcatgacaatgcggtgcgtgggcgtgggcaacagagacttcgtggagggcctgagcggagcaacctgggtggatgtggtgctggagcacggaggatgcgtgaccacaatggccaagaataagcccacactggacatcgagctgcagaagacagaggcaacccagctggccaccctgcgcaagctgtgcatcgagggcaagatcacaaacatcaccacaggctctcggtgtccaacccagggagaggcaatcctgccagaggagcaggaccagaactacgtgtgcaagcacacatatgtggataggggctggggcaatggctgtggcctgtttggcaagggcagcctggtgacctgcgccaagttccagtgtctggagcctatcgagggcaaggtggtgcagtacgagaacctgaagtataccgtgatcatcacagtgcacaccggcgatcagccacaagtgggaaatgacacccagggcgtgacagtggagatcacccctcaggcctccaccgtggaggccgtgctgctggagtacggcacactgggcctgaagtgctctcctagaaccggcctggactttaacgagatgatcctgctgacaatgaagaccaaggcctggatggtgcacaggcagtggttctttgatctgccactgccctggacatctggcgccaccacagagacaccaacctggaaccgcaaggagctgctggtgaccttcaagaatgcccacgccaagaagcaggaggtggtggtgctgggatcccaggagggagcaatgcacacagccctgaccggagccacagagatccagaacagcggcggcacatccatctttgccggccacctgaagtgccggctgaagatggacaagctggagctgaagggcatgtcttacgccatgtgcctgaataccttcgtgctgaagaaggaggtgagcgagacacagcacggcaccatcctgatcaaggtggagtataagggcgaggacgccccctgtaagatcccttttagcaccgaggatggacagggcaaggcacacaacggccgcctgatcacagccaatcctgtggtgaccaagaaggaggagccagtgaacatcgaggccgagccacccttcggcgagtccaatatcgtgatcggcatcggcgacaaggccctgaagatcaactggtacaagaagggcagctccatcggcaagatgtttgaggcaacagccagaggcgcccggaggatggccatcctgggcgataccgcatgggacttcggctccgtgggaggcgtgctgaattctctgggcaagatggtgcaccagatctttggctccgcctataccgccctgttctccggcgtgtcttggatcatgaagatcggcatcggcgtgctgctgacatggatcggcctgaactctaagaatacctccatgtctttcagctgcatcgtgatcggcatcatcaccctgtacctgggcgcagtggtgcaggcagacatgggctgcgtgatcaactggaagggcaaggagctgaagtgtggctctggcatctttgtgacaaatgaggtgcacacatggaccgagcagtataagttccaggcagatagcccaaagcgcctggccaccgcaatcgcaggagcatgggagaactcagtgtgcggcatccggtccaccacaagaatggagaatctgctgtggaagcagatcgccaacgagctgaattacatcctgtgggagaacaatatcaagctgaccgtggtggtgggcgacatcatcggcgtgctggagcagggcaagagaacactgacccctcagccaatggagctgaagtatagctggaagacatggggcaaggccaagatcgtgaccgccgagacacagaactctagcttcatcatcgacggccccaatacccctgagtgcccatccgcctctagggcctggaacgtgtgggaggtggaggattacggctttggcgtgttcaccacaaatatctggctgaagctgagagaggtgtacacccagagctgtgatcacaggctgatgtccgccgccatcaaggatgagagggccgtgcacgcagacatgggatactggatcgagagccagaagaacggctcctggaagctggagaaggcctcctttatcgaggtgaagacatgcacctggcccaagtctcacaccctgtggagcaacggcgtgctggagtctgacatgatcatcccaaagtccctggccggccccatctctcagcacaatcacaggcccggctaccacacacagaccgcaggaccttggcacctgggcaagctggagctggatttcaactattgcgagggcaccacagtggtcatcacagagaattgtggcaccaggggcccatctctgcgcaccacaaccgtgagcggcaagctgatccacgagtggtgctgtcggtcctgcaccctgcctccactgagatacatgggcgaggacggctgttggtatggcatggagatccgccccatcaacgagaaggaggagaatatggtgaagagcctggtgtccgccggctctggcaaggtggataacttcaccatgggcgtgctgtgcctggccatcctgtttgaggaagtgatgcggggcaagttcggcaagaagcacatgatcgccggcgtgctgttcacctttgtgctgctgctgagcggccagatcacatggagagacatggcccacaccctgatcatgatcggcagcaatgcctccgataggatgggcatgggcgtgacatacctggccctgatcgccacctttaagatccagccattcctggccctgggcttctttctgcggaagctgacctccagagagaacctgctgctgggcgtgggcctggccatggcaacaaccctgcagctgcccgaggacatcgagcagatggccaatggcatcgccctgggcctgatgacactgaagctgatcacacagtttgagacatatcagctgtggaccgccctggtgtctctgacatgcagcaacaccatcttcacactgaccgtggcatggcgcacagccaccctgatcctggcaggcgtgagcctgctgccactgtgccagtcctctagcatgcggaagacagactggctgcctatgaccgtggcagcaatgggcgtgccccctctgccactgttcatctttagcctgaaggatacccctaagcggagatcctggccactgaacgagggcgtgatggcagtgggcctggtgtccatcctggcctcctctctgctgagaaatgacgtgccaatggcaggacccctggtggcaggaggcctgctgatcgcctgctacgtgatcacaggcaccagcgccgatctgaccgtggagaaggcagcagacgtgacatgggaggaggaggcagagcagaccggcgtgtcccacaacctgatgatcacagtggacgatgacggcaccatgaggatcaaggatgacgagacagagaatatcctgaccgtgctgctgaagacagccctgctgatcgtgagcggcatcttcccttactccatcccagccaccctgctggtgtggcacacctggcagaagcagacacagcggagcggcgtgctgtgggacgtgccaagcccaccagagacacagaaggccgagctggaggagggcgtgtatcggatcaagcagcagggcatctttggcaagacccaagtgggagtgggcgtgcagaaggagggcgtgttccacaccatgtggcacgtgacacggggcgccgtgctgacccacaacggcaagagactggagccaaattgggcctccgtgaagaaggacctgatctcttacggcggaggatggcggctgagcgcccagtggcagaagggagaggaggtgcaggtcatcgcagtggagcccggcaagaaccctaagaattttcagaccatgcctggcatcttccagacaaccacaggagagatcggagcaattgccctggacttcaagcccggcacaagcggctcccctatcatcaacagggagggcaaggtggtgggcctgtacggcaacggcgtggtgaccaagaatggcggctacgtgagcggcatcgcacagacaaacgcagagcctgacggaccaacccctgagctggaggaggagatgttcaagaagcggaatctgacaatcatggatctgcaccccggctctggcaagaccaggaagtacctgcctgccatcgtgcgcgaggccatcaagaggcgcctgcggacactgatcctggcaccaaccagagtggtggcagcagagatggaggaggccctgaagggcctgcccatcagatatcagaccacagccaccaagtccgagcacacaggcagggagatcgtggacctgatgtgccacgccaccttcaccatgaggctgctgtctccagtgcgcgtgcccaactacaatctgatcatcatggatgaggcccacttcacagacccagcctccatcgccgccagaggctatatctctaccagagtgggaatgggagaggctgccgccatctttatgacagccacccctccaggcaccgcagaggcattcccacagagcaacgcacctatccaggatgaggagagggacatcccagagcggagctggaacagcggcaatgagtggatcacagactttgtgggcaagaccgtgtggttcgtgcccagcatcaaggccggcaacgatatcgccaactgcctgaggaagaatggcaagaaagtgatccagctgtcccgcaagacctttgacacagagtaccagaagacccggctgaacgattgggactttctggtgaccacagatatctccgagatgggcgccaatttcaaggccgatagagtgatcgacccacggagatgtctgaagcccgtgatcctgacagacggaccagagagagtgatcctggcaggaccaatgcccgtgaccgcagccagcgccgcacagaggcgcggcagggtgggccgcaacccacagaaggagaatgaccagtatatcttcaccggccagcccctgaacaatgatgaggaccacgcccactggacagaggccaagatgctgctggataacatcaataccccagagggcatcatccccgccctgtttgagcctgagagggagaagagcgccgcaatcgacggagagtacaggctgaagggcgagtcccgcaagacattcgtggagctgatgaggagaggcgatctgcccgtgtggctagcccacaaggtggcctccgagggcatcaagtataccgataggaagtggtgctttgacggcgagcgcaacaatcagatcctggaggagaacatggacgtggagatctggacaaaggagggcgagagaaagaagctgcggccaagatggctggatgcaaggacctacagcgaccccctggccctgaaggagtttaaggacttcgcagcaggaaggaagtccatcgccctggatctggtgaccgagatcggccgggtgccatctcacctggcacacaggacacgcaacgccctggataacctggtcatgctgcacacctccgagcacggcggcagagcctatagacacgccgtggaggagctgcccgagacaatggagacactgctgctgctgggcctgatgatcctgctgacaggcggcgccatgctgttcctgatcagcggcaagggcatcggcaagacctccatcggcctgatctgcgtgatcgtgagcagcggcatgctgtggatggccgacgtgcctctgcagtggatcgccagcgccatcgtgctggagttctttatgatggtgctgctgatccctgagccagagaagcagagaacaccacaggacaaccagctggcctacgtggtcatcggcatcctgaccctggccgcaatcgtggccgccaatgagatgggcctgctggagacaacaaagagggatctgggcatgagcaaggagccaggcgtggtgtcccccacctcttacctggatgtggacctgcaccctgcctccgcctggacactgtatgccgtggccaccacagtgatcaccccaatgctgagacacaccatcgagaactccacagccaacgtgagcctggccgcaatcgcaaaccaggcagtggtgctgatgggcctggacaagggctggccaatctccaagatggacctaggcgtgcccctgctggccctgggctgctactctcaagtgaatccactgacactgaccgcagccgtgctgctgctggtgacccactatgccatcatcggccctggcctgcaggcaaaggcaacacgggaggcacagaagagaaccgcagcaggaatcatgaagaaccccacagtggacggcatcatgaccatcgatctggaccctgtgatctacgatagcaagtttgagaagcagctgggccaggtcatgctgctggtgctgtgcgccgtgcagctgctgctgatgagaacctcttgggcactgtgcgaggccctgaccctggccacaggccctatcaccacactgtgggagggcagcccaggcaagttctggaacaccacaatcgccgtgtctatggccaatatctttaggggcagctacctggcaggcacaggcctggccttctccatcatgaagtctgtgggcaccggcaggcgcggcacaggcagccagggagagacactgggcgagaagtggaagaagaagctgaaccagctgtctagaaaggagtttgacctgtataagaagagcggcatcaccgaggtggatcgcacagaggcaaaggagggcctgaagaggggagagacaacacaccacgccgtgagcaggggctccgccaagctgcagtggttcgtggagcggaatatggtcatccctgagggcagagtgatcgacctgggctgcggcaggggaggatggtcctactattgtgccggcctgaagaaggtgacagaggtgagaggatacaccaagggaggcccaggccacgaggagcccgtgcctatgtccacatacggctggaacatcgtgaagctgatgtctggcaaggacgtgttctacctgccccctgagaagtgcgataccctgctgtgcgacatcggcgagtctagcccatctcccacagtggaggagagcaggaccatccgcgtgctgaagatggtggagccctggctgaagaacaatcagttctgcatcaaggtgctgaatccctacatgcctaccgtgatcgagcacctggagcggctgcagagaaagtatggcggcatgctggtgaggaaccctctgtctcgcaatagcacacacgagatgtattggatcagcaacggcaccggcaatatcgtgtcctctgtgaacatggtgtcccggctgctgctgaatagattcacaatgacccacagacggcccaccatcgagaaggatgtggacctgggcgcaggcacaaggcacgtgaacgccgagccagagacacccaatatggacgtgatcggcgagaggatcaagcgcatcaaggaggagcacagctccacatggcactacgatgacgagaacccatataagacctgggcctaccacggctcctatgaggtgaaggccacaggctctgcctctagcatgatcaatggcgtggtgaagctgctgaccaagccttgggacgtggtgccaatggtgacccagatggccatgacagataccacaccctttggccagcagcgcgtgttcaaggagaaggtggatacacggacccctagaccaatgcccggcacacggaaagtgatggagatcaccgcagagtggctgtggaggacactgggccgcaacaagaagcctcggctgtgcaccagagaggagtttacaaagaaggtgcgcaccaacgcagcaatgggagccgtgttcaccgaggagaatcagtgggatagcgccagagccgcagtggaggacgaggagttctggaagctggtggatcgggagagagagctgcacaagctgggcaagtgcggctcttgcgtgtataacatgatgggcaagagagagaagaagctgggcgagtttggcaaggccaagggcagcagggccatctggtacatgtggctgggcgccaggtacctggagtttgaggccctgggcttcctgaacgaggaccactggttctctcgcgagaattcttacagcggagtggagggagagggcctgcacaagctgggctatatcctgcgggacatcagcaagatccctggcggcgccatgtatgcagatgacaccgcaggatgggatacccgcatcacagaggatgacctgcacaacgaggagaagatcacacagcagatggaccccgagcacagacagctggccaacgccatctttaagctgacctaccagaataaggtggtgaaggtgcagaggcctacaccaaagggcaccgtgatggatatcatcagcaggaaggaccagaggggctccggacaagtgggcacctatggcctgaacacattcaccaatatggaggcacagctggtgcggcagatggagggagagggcgtgctgagcaaggcagacctggagaatccccacctgctggagaagaagatcacacagtggctggagacaaagggcgtggagaggctgaagcgcatggccatctccggcgatgactgcgtggtgaagcctatcgatgacagatttgccaacgccctgctggccctgaatgatatgggcaaggtgaggaaggacatccctcagtggcagccatctaagggctggcacgattggcagcaggtgcctttttgcagccaccacttccacgagctgatcatgaaggacggcaggaagctggtggtgccttgtcgcccacaggatgagctgatcggaagggcccgcatctcccagggagcaggatggagcctgaaggagacagcctgcctgggcaaggcctacgcccagatgtggagcctgatgtatttccacaggcgcgacctgagactggccagcaacgccatctgttccgccgtgcccgtgcactgggtgcctacctctaggaccacatggagcatccacgcccaccaccagtggatgaccacagaggatatgctgacagtgtggaacagagtgtggatcgaggataatccctggatggaggacaagacccctgtgaccacatgggaggacgtgccctacctgggcaagagagaggatcagtggtgtggcagcctgatcggcctgacatccagggccacctgggcacagaatatcctgaccgccatccagcaggtgaggtccctgatcggcgatgaggagttcctggactacatgccatcaatgaagaggtttaggaaggaggaagaatccgagggggctatctggtaaacaaaggaagtaaaaaagagacaaactgtcaggccaccttaagccacagtacggaagaagctgtgcagcctgtgagccccgtccaaggacgttaaaagaagaagtcaggcccaaaagccacggcttgagcaaaccgtgctgcctgtagctccgtcgtggggacgtaaagcctgggaggctgcaaaccgtggaagctgtacgcacggtgtagcagactagcggttagaggagacccctcccatgacacaacgcagcagcggggcccgagcactgagggaagctgtacctccttgcaaaggactagaggttagaggagaccccccgcaaataaaaacagcatattgacgctgggagagaccagagatcctgctgtctcctcagcatcattccaggcacagaacgccagaaaatggaatggtgctgttgaatcaacaggttct

SEQ ID NO: 79 - RNA, 10173 nt, synthetic construct
  source 1..10173: mol_type = other RNA
atgaacaaccaacgaaaaaagacgggaaaaccgtctatcaatatgctgaaacgcgtgagaaaccgtgtgtcaactggctcacagctggccaagcggttctccagaggcctgctgaacggacagggacccatgaagctggtcatggccttcatcgcctttctgcgcttcctggcaatcccacctacagcaggcgtgctggccagatggggcacctttaagaagagcggcgccatcaaggtgctgaagggcttcaagaaggagatctccaacatgctgtctatcatcaataagcgcaagaagaccagcctgtgcctgatgatgatgctgcctgccacactggcctttcacctgaccagccgggacggcgagccaagaatgatcgtgggcaagaacgagcggggcaagtctctgctgttcaagaccgccagcggcatcaatatgtgcaccctgatcgccatggatctgggcgagatgtgcgacgataccgtgacatacaagtgtcctctgatcgccgaggtggagccagaggatatcgactgctggtgtaacctgaccagcacatgggtgacatatggcacctgcaatcaggcaggagagcacaggagagacaagcggagcgtggccctggccccacacgtgggaatgggcctggatacccggacacagacctggatgtctgccgagggagcatggaggcaggtggagaaggtggagacatgggccctgagacaccccgggtttaccatcctggccctgttcctggcccactacatcggcacatctctgacccagaaggtggtcatcttcatcctgctgatgctggtgacccctagcatgacaatgcggtgcgtgggcgtgggcaacagagacttcgtggagggcctgagcggagcaacctgggtggatgtggtgctggagcacggaggatgcgtgaccacaatggccaagaataagcccacactggacatcgagctgcagaagacagaggcaacccagctggccaccctgcgcaagctgtgcatcgagggcaagatcacaaacatcaccacaggctctcggtgtccaacccagggagaggcaatcctgccagaggagcaggaccagaactacgtgtgcaagcacacatatgtggataggggctggggcaatggctgtggcctgtttggcaagggcagcctggtgacctgcgccaagttccagtgtctggagcctatcgagggcaaggtggtgcagtacgagaacctgaagtataccgtgatcatcacagtgcacaccggcgatcagccacaagtgggaaatgacacccagggcgtgacagtggagatcacccctcaggcctccaccgtggaggccgtgctgctggagtacggcacactgggcctgaagtgctctcctagaaccggcctggactttaacgagatgatcctgctgacaatgaagaccaaggcctggatggtgcacaggcagtggttctttgatctgccactgccctggacatctggcgccaccacagagacaccaacctggaaccgcaaggagctgctggtgaccttcaagaatgcccacgccaagaagcaggaggtggtggtgctgggatcccaggagggagcaatgcacacagccctgaccggagccacagagatccagaacagcggcggcacatccatctttgccggccacctgaagtgccggctgaagatggacaagctggagctgaagggcatgtcttacgccatgtgcctgaataccttcgtgctgaagaaggaggtgagcgagacacagcacggcaccatcctgatcaaggtggagtataagggcgaggacgccccctgtaagatcccttttagcaccgaggatggacagggcaaggcacacaacggccgcctgatcacagccaatcctgtggtgaccaagaaggaggagccagtgaacatcgaggccgagccacccttcggcgagtccaatatcgtgatcggcatcggcgacaaggccctgaagatcaactggtacaagaagggcagctccatcggcaagatgtttgaggcaacagccagaggcgcccggaggatggccatcctgggcgataccgcatgggacttcggctccgtgggaggcgtgctgaattctctgggcaagatggtgcaccagatctttggctccgcctataccgccctgttctccggcgtgtcttggatcatgaagatcggcatcggcgtgctgctgacatggatcggcctgaactctaagaatacctccatgtctttcagctgcatcgtgatcggcatcatcaccctgtacctgggcgcagtggtgcaggcagacatgggctgcgtgatcaactggaagggcaaggagctgaagtgtggctctggcatctttgtgacaaatgaggtgcacacatggaccgagcagtataagttccaggcagatagcccaaagcgcctggccaccgcaatcgcaggagcatgggagaactcagtgtgcggcatccggtccaccacaagaatggagaatctgctgtggaagcagatcgccaacgagctgaattacatcctgtgggagaacaatatcaagctgaccgtggtggtgggcgacatcatcggcgtgctggagcagggcaagagaacactgacccctcagccaatggagctgaagtatagctggaagacatggggcaaggccaagatcgtgaccgccgagacacagaactctagcttcatcatcgacggccccaatacccctgagtgcccatccgcctctagggcctggaacgtgtgggaggtggaggattacggctttggcgtgttcaccacaaatatctggctgaagctgagagaggtgtacacccagagctgtgatcacaggctgatgtccgccgccatcaaggatgagagggccgtgcacgcagacatgggatactggatcgagagccagaagaacggctcctggaagctggagaaggcctcctttatcgaggtgaagacatgcacctggcccaagtctcacaccctgtggagcaacggcgtgctggagtctgacatgatcatcccaaagtccctggccggccccatctctcagcacaatcacaggcccggctaccacacacagaccgcaggaccttggcacctgggcaagctggagctggatttcaactattgcgagggcaccacagtggtcatcacagagaattgtggcaccaggggcccatctctgcgcaccacaaccgtgagcggcaagctgatccacgagtggtgctgtcggtcctgcaccctgcctccactgagatacatgggcgaggacggctgttggtatggcatggagatccgccccatcaacgagaaggaggagaatatggtgaagagcctggtgtccgccggctctggcaaggtggataacttcaccatgggcgtgctgtgcctggccatcctgtttgaggaagtgatgcggggcaagttcggcaagaagcacatgatcgccggcgtgctgttcacctttgtgctgctgctgagcggccagatcacatggagagacatggcccacaccctgatcatgatcggcagcaatgcctccgataggatgggcatgggcgtgacatacctggccctgatcgccacctttaagatccagccattcctggccctgggcttctttctgcggaagctgacctccagagagaacctgctgctgggcgtgggcctggccatggcaacaaccctgcagctgcccgaggacatcgagcagatggccaatggcatcgccctgggcctgatgacactgaagctgatcacacagtttgagacatatcagctgtggaccgccctggtgtctctgacatgcagcaacaccatcttcacactgaccgtggcatggcgcacagccaccctgatcctggcaggcgtgagcctgctgccactgtgccagtcctctagcatgcggaagacagactggctgcctatgaccgtggcagcaatgggcgtgccccctctgccactgttcatctttagcctgaaggatacccctaagcggagatcctggccactgaacgagggcgtgatggcagtgggcctggtgtccatcctggcctcctctctgctgagaaatgacgtgccaatggcaggacccctggtggcaggaggcctgctgatcgcctgctacgtgatcacaggcaccagcgccgatctgaccgtggagaaggcagcagacgtgacatgggaggaggaggcagagcagaccggcgtgtcccacaacctgatgatcacagtggacgatgacggcaccatgaggatcaaggatgacgagacagagaatatcctgaccgtgctgctgaagacagccctgctgatcgtgagcggcatcttcccttactccatcccagccaccctgctggtgtggcacacctggcagaagcagacacagcggagcggcgtgctgtgggacgtgccaagcccaccagagacacagaaggccgagctggaggagggcgtgtatcggatcaagcagcagggcatctttggcaagacccaagtgggagtgggcgtgcagaaggagggcgtgttccacaccatgtggcacgtgacacggggcgccgtgctgacccacaacggcaagagactggagccaaattgggcctccgtgaagaaggacctgatctcttacggcggaggatggcggctgagcgcccagtggcagaagggagaggaggtgcaggtcatcgcagtggagcccggcaagaaccctaagaattttcagaccatgcctggcatcttccagacaaccacaggagagatcggagcaattgccctggacttcaagcccggcacaagcggctcccctatcatcaacagggagggcaaggtggtgggcctgtacggcaacggcgtggtgaccaagaatggcggctacgtgagcggcatcgcacagacaaacgcagagcctgacggaccaacccctgagctggaggaggagatgttcaagaagcggaatctgacaatcatggatctgcaccccggctctggcaagaccaggaagtacctgcctgccatcgtgcgcgaggccatcaagaggcgcctgcggacactgatcctggcaccaaccagagtggtggcagcagagatggaggaggccctgaagggcctgcccatcagatatcagaccacagccaccaagtccgagcacacaggcagggagatcgtggacctgatgtgccacgccaccttcaccatgaggctgctgtctccagtgcgcgtgcccaactacaatctgatcatcatggatgaggcccacttcacagacccagcctccatcgccgccagaggctatatctctaccagagtgggaatgggagaggctgccgccatctttatgacagccacccctccaggcaccgcagaggcattcccacagagcaacgcacctatccaggatgaggagagggacatcccagagcggagctggaacagcggcaatgagtggatcacagactttgtgggcaagaccgtgtggttcgtgcccagcatcaaggccggcaacgatatcgccaactgcctgaggaagaatggcaagaaagtgatccagctgtcccgcaagacctttgacacagagtaccagaagacccggctgaacgattgggactttctggtgaccacagatatctccgagatgggcgccaatttcaaggccgatagagtgatcgacccacggagatgtctgaagcccgtgatcctgacagacggaccagagagagtgatcctggcaggaccaatgcccgtgaccgcagccagcgccgcacagaggcgcggcagggtgggccgcaacccacagaaggagaatgaccagtatatcttcaccggccagcccctgaacaatgatgaggaccacgcccactggacagaggccaagatgctgctggataacatcaataccccagagggcatcatccccgccctgtttgagcctgagagggagaagagcgccgcaatcgacggagagtacaggctgaagggcgagtcccgcaagacattcgtggagctgatgaggagaggcgatctgcccgtgtggctagcccacaaggtggcctccgagggcatcaagtataccgataggaagtggtgctttgacggcgagcgcaacaatcagatcctggaggagaacatggacgtggagatctggacaaaggagggcgagagaaagaagctgcggccaagatggctggatgcaaggacctacagcgaccccctggccctgaaggagtttaaggacttcgcagcaggaaggaagtccatcgccctggatctggtgaccgagatcggccgggtgccatctcacctggcacacaggacacgcaacgccctggataacctggtcatgctgcacacctccgagcacggcggcagagcctatagacacgccgtggaggagctgcccgagacaatggagacactgctgctgctgggcctgatgatcctgctgacaggcggcgccatgctgttcctgatcagcggcaagggcatcggcaagacctccatcggcctgatctgcgtgatcgtgagcagcggcatgctgtggatggccgacgtgcctctgcagtggatcgccagcgccatcgtgctggagttctttatgatggtgctgctgatccctgagccagagaagcagagaacaccacaggacaaccagctggcctacgtggtcatcggcatcctgaccctggccgcaatcgtggccgccaatgagatgggcctgctggagacaacaaagagggatctgggcatgagcaaggagccaggcgtggtgtcccccacctcttacctggatgtggacctgcaccctgcctccgcctggacactgtatgccgtggccaccacagtgatcaccccaatgctgagacacaccatcgagaactccacagccaacgtgagcctggccgcaatcgcaaaccaggcagtggtgctgatgggcctggacaagggctggccaatctccaagatggacctaggcgtgcccctgctggccctgggctgctactctcaagtgaatccactgacactgaccgcagccgtgctgctgctggtgacccactatgccatcatcggccctggcctgcaggcaaaggcaacacgggaggcacagaagagaaccgcagcaggaatcatgaagaaccccacagtggacggcatcatgaccatcgatctggaccctgtgatctacgatagcaagtttgagaagcagctgggccaggtcatgctgctggtgctgtgcgccgtgcagctgctgctgatgagaacctcttgggcactgtgcgaggccctgaccctggccacaggccctatcaccacactgtgggagggcagcccaggcaagttctggaacaccacaatcgccgtgtctatggccaatatctttaggggcagctacctggcaggcacaggcctggccttctccatcatgaagtctgtgggcaccggcaggcgcggcacaggcagccagggagagacactgggcgagaagtggaagaagaagctgaaccagctgtctagaaaggagtttgacctgtataagaagagcggcatcaccgaggtggatcgcacagaggcaaaggagggcctgaagaggggagagacaacacaccacgccgtgagcaggggctccgccaagctgcagtggttcgtggagcggaatatggtcatccctgagggcagagtgatcgacctgggctgcggcaggggaggatggtcctactattgtgccggcctgaagaaggtgacagaggtgagaggatacaccaagggaggcccaggccacgaggagcccgtgcctatgtccacatacggctggaacatcgtgaagctgatgtctggcaaggacgtgttctacctgccccctgagaagtgcgataccctgctgtgcgacatcggcgagtctagcccatctcccacagtggaggagagcaggaccatccgcgtgctgaagatggtggagccctggctgaagaacaatcagttctgcatcaaggtgctgaatccctacatgcctaccgtgatcgagcacctggagcggctgcagagaaagtatggcggcatgctggtgaggaaccctctgtctcgcaatagcacacacgagatgtattggatcagcaacggcaccggcaatatcgtgtcctctgtgaacatggtgtcccggctgctgctgaatagattcacaatgacccacagacggcccaccatcgagaaggatgtggacctgggcgcaggcacaaggcacgtgaacgccgagccagagacacccaatatggacgtgatcggcgagaggatcaagcgcatcaaggaggagcacagctccacatggcactacgatgacgagaacccatataagacctgggcctaccacggctcctatgaggtgaaggccacaggctctgcctctagcatgatcaatggcgtggtgaagctgctgaccaagccttgggacgtggtgccaatggtgacccagatggccatgacagataccacaccctttggccagcagcgcgtgttcaaggagaaggtggatacacggacccctagaccaatgcccggcacacggaaagtgatggagatcaccgcagagtggctgtggaggacactgggccgcaacaagaagcctcggctgtgcaccagagaggagtttacaaagaaggtgcgcaccaacgcagcaatgggagccgtgttcaccgaggagaatcagtgggatagcgccagagccgcagtggaggacgaggagttctggaagctggtggatcgggagagagagctgcacaagctgggcaagtgcggctcttgcgtgtataacatgatgggcaagagagagaagaagctgggcgagtttggcaaggccaagggcagcagggccatctggtacatgtggctgggcgccaggtacctggagtttgaggccctgggcttcctgaacgaggaccactggttctctcgcgagaattcttacagcggagtggagggagagggcctgcacaagctgggctatatcctgcgggacatcagcaagatccctggcggcgccatgtatgcagatgacaccgcaggatgggatacccgcatcacagaggatgacctgcacaacgaggagaagatcacacagcagatggaccccgagcacagacagctggccaacgccatctttaagctgacctaccagaataaggtggtgaaggtgcagaggcctacaccaaagggcaccgtgatggatatcatcagcaggaaggaccagaggggctccggacaagtgggcacctatggcctgaacacattcaccaatatggaggcacagctggtgcggcagatggagggagagggcgtgctgagcaaggcagacctggagaatccccacctgctggagaagaagatcacacagtggctggagacaaagggcgtggagaggctgaagcgcatggccatctccggcgatgactgcgtggtgaagcctatcgatgacagatttgccaacgccctgctggccctgaatgatatgggcaaggtgaggaaggacatccctcagtggcagccatctaagggctggcacgattggcagcaggtgcctttttgcagccaccacttccacgagctgatcatgaaggacggcaggaagctggtggtgccttgtcgcccacaggatgagctgatcggaagggcccgcatctcccagggagcaggatggagcctgaaggagacagcctgcctgggcaaggcctacgcccagatgtggagcctgatgtatttccacaggcgcgacctgagactggccagcaacgccatctgttccgccgtgcccgtgcactgggtgcctacctctaggaccacatggagcatccacgcccaccaccagtggatgaccacagaggatatgctgacagtgtggaacagagtgtggatcgaggataatccctggatggaggacaagacccctgtgaccacatgggaggacgtgccctacctgggcaagagagaggatcagtggtgtggcagcctgatcggcctgacatccagggccacctgggcacagaatatcctgaccgccatccagcaggtgaggtccctgatcggcgatgaggagttcctggactacatgccatcaatgaagaggtttaggaaggaggaagaatccgagggggctatctggtaa

SEQ ID NO: 80 - RNA, 10653 nt, synthetic construct
  source 1..10653: mol_type = other RNA
agttgttagtctgtgtggaccgacaaggacagttccaaatcggaagcttgcttaacacagttctaacagtttgttttaaatagagagcagatctctggaaaaatgaaccaacgaaaaaaggtggttagaccacctttcaatatgctgaaacgcgagagaaaccgcgtatcaacccctcaggggctggtcaagaggttctccaccggcctgttttctggcaagggccctctgaggatggtgctggccttcatcacatttctgcgcgtgctgagcatcccacctaccgcaggcatcctgaagcggtggggacagctgaagaagaacaaggccatcaagatcctgatcggcttcaggaaggagatcggccgcatgctgaacatcctgaatcggagaaggcgcagcacaatgaccctgctgtgcctgatcccaaccgtgatggccttccacctgtccacacgggacggcgagcctctgatgatcgtggccaagcacgagcggggcagaccactgctgtttaagaccacagagggcatcaataagtgtaccctgatcgctatggacctgggcgagatgtgcgaggacacagtgacctacaagtgtcccctgctggtgaacaccgagcctgaggacatcgattgctggtgtaatctgacatccacctgggtcatgtatggcacatgcacccagtctggcgagcggagaagggagaagcggtccgtggccctgaccccacactctggaatgggcctggagacacgggccgagacatggatgagctccgagggagcatggaagcacgcacagagggtggagagctggattctgaggaacccaggattcgcactgctggccggctttatggcctacatgatcggccagaccggcatccagaggacagtgttctttgtgctgatgatgctggtggcaccatcctatggcatgagatgcgtgggcgtgggcaatagagatttcgtggagggcgtgtctggaggagcatgggtggacctggtgctggagcacggaggatgcgtgaccacaatggcccagggcaagcctacactggattttgagctgaccaagaccacagccaaggaggtggccctgctgcggacctactgcatcgaggcctccatctctaacatcaccacagccaccagatgtcctacacagggcgagccataccttaaggaggagcaggaccagcagtatatctgccgccgggacgtggtggataggggatggggcaatggatgtggcctgttcggcaagggaggagtggtgacatgcgccaagttcctgtgctccggcaagatcaccggcaacctggtgcagatcgagaatctggagtataccgtggtggtgacagtgcacaacggcgatacccacgccgtgggcaacgacacatccaatcacggcgtgacagccaccatcacaccccggagcccttccgtggaggtgaagctgcccgattacggcgagctgaccctggactgcgagcctagatctggcatcgatttcaacgagatgatcctgatgaagatgaagaagaagacctggctggtgcacaagcagtggtttctggatctgcctctgccctggagcgccggagcagacacctccgaggtgcactggaattacaaggagaggatggtgacattcaaggtgccccacgcaaagaggcaggacgtgaccgtgctgggcagccaggagggagcaatgcactccgccctggccggagccaccgaggtggacagcggcgatggcaaccacatgttcgccggccacctgaagtgcaaggtgcggatggagaagctgagaatcaagggcatgtcctacacaatgtgcagcggcaagttttccatcgataaggagatggccgagacacagcacggcaccacagtggtgaaggtgaagtatgagggagcaggagcaccttgtaaggtgcctatcgagatccgggacgtgaacaaggagaaggtggtgggcagaatcatctctagcacccccttcgccgagaacaccaatagcgtgacaaatatcgagctggagccaccctttggcgatagctacatcgtgatcggagtgggcgactccgccctgacactgcactggttcagaaagggctcctctatcggcaagatgtttgagtccacctatcggggcgccaagaggatggctatcctgggcgagaccgcatgggacttcggcagcgtgggaggcctgtttaccagcctgggcaaggccgtgcaccaggtgttcggctccgtgtataccacaatgtttggcggcgtgtcttggatgatcagaatcctgatcggcttcctggtgctgtggatcggcaccaactctcgcaatacaagcatggccatgacctgcatcgccgtgggcggcatcacactgttcctgggctttaccgtgcaggccgatatgggctgcgtggtgagctggaacggcaaggagctgaagtgtggctccggcatcttcgtggtggacaatgtgcacacctggacagagcagtacaagtttcagccagagtctccagcaaggctggccagcgccatcctgaacgcccacaaggattcagtgtgcggcatcaggagcaccacacgcctggagaatgtgatgtggaagcagatcacaaacgagctgaattatgtgctgtgggagggaggacacgatctgaccgtggtggcaggcgacgtgaagggcgtgctgaccaagggcaagagggccctgacacctccagtgaacgacctgaagtactcctggaagacatggggcaaggccaagatcttcacccccgaggcccgcaattctacatttctgatcgacggccccgataccagcgagtgccctaacggcagaagggcctggaatttcctggaggtggaggattatggcttcggcatgtttaccacaaacatctggatgaagtttagggagggcagctccgaggtgtgcgaccacaggctgatgtccgccgccatcaaggatcagaaggccgtgcacgccgacatgggctactggatcgagtctagcaagaatcagacatggcagatcgagaaggcctctctgatcgaggtgaagacctgcctgtggcctaagacccacacactgtggagcaacggcgtgctggagtctcagatgctgatcccacggagctacgccggacccttctcccagcacaattacagacagggatatgcaacccagacagcaggaccctggcacctgggcaagctggagatcgattttggcgagtgccctggcaccacagtgaccatccaggaggactgtgatcacaggggaccatccctgcgtacgacaaccgcctctggcaagctggtgacccagtggtgctgtaggagctgcacaatgccacctctgcgcttcctgggagaggacggctgttggtatggcatggagatccggcccctgtctgagaaggaggagaacatggtgaagagccaggtgaccgcaggacagggcacctccgagacattctctatgggcctgctgtgcctgacactgtttgtggaggagtgtctgcgccggagagtgaccagaaagtacatgatgctggtggtggtcatcaccttctgtgccatcatcctgggcggcctgacctggatggatctgctgagggccctgatcatgctgggcgacaccatgtccggaaggatcggaggacagatccacctggccatcatggccgtgttcaagatgtcccctggctacgtgctgggcgtgtttctgcggaagctgaccagccgggagacagccctgatggtcatcggcatggccatgacaaccgtgttctctatcccacacgacctgatggagctgatcgatggcatcagcctgggcctgatcctgctgaggatcgtgacccacttcgacaacacccaagtgggcaccctggccctgagcctgaccttcatccggagcacaacccctctggtcatggcctggagaaccatcatggccgtgttctttgtggtgaccctgatcccactgtgccgcacatcctgtctgcagaagcagtctcactgggtggagatcacagccctgatcctgggagcacaggccctgcccgtgtacctgatgaccctgatgaagggcgcctccaggcgctcttggccactgaacgagggcatcatggcagtgggcctggtgagcctgctgggctccgccctgctgaagaatgatgtgccactggccggacctatggtggcaggaggcctgctgctggccgcctacgtgatgagcggctcctctgccgacctgtccctggagaaggccgccaacgtgcagtgggacgagatggccgacatcaccggcagctcccccatcatcgaggtgaagcaggacgaggatggctctttcagcatcagggatgtggaggagacaaatatgatcacactgctggtgaagctggccctgatcaccgtgagcggcctgtaccctctggccatcccagtgacaatggccctgtggtatatctggcaggtgaagacccagcggagcggcgccctgtgggacgtgccatctcctgcagcaacccagaaggccacactgagcgagggcgtgtatcggatcatgcagagaggcctgttcggcaagacccaagtgggcgtgggcatccacatggagggcgtgtttcacacaatgtggcacgtgaccaggggctccgtgatctgccacgagacaggccgcctggagccatcctgggcagacgtgcggaacgatatgatctcttacggcggaggatggaggctgggcgacaagtgggataaggaggaggatgtgcaggtgctggccatcgagcccggcaagaatcctaagcacgtgcagaccaagcctggcctgttcaagaccctgacaggagagatcggagcagtgaccctggactttaagcctggtacctccggctctccaatcatcaacaagaagggcaaagtgatcggcctgtacggcaatggcgtggtgacaaagagcggcgattacgtgagcgccatcacccaggcagagaggatcggagagccagactatgaggtggacgaggacatcttccggaagaagcggctgacaatcatggatctgcaccctggcgccggcaagaccaagagaatcctgccaagcatcgtgcgcgaggccctgaagcggagactgcggacactgatcctggcaccaaccagagtggtggcagcagagatggaggaggccctgaggggcctgccaatccgctaccagacccctgccgtgaagtccgagcacacaggcagagagatcgtggacctgatgtgccacgccaccttcacaaccaggctgctgtctagcacacgcgtgccaaactacaatctgatcgtgatggacgaggcccactttacagatccctgtagcgtggccgccagaggctatatctccaccagagtggagatgggagaggcagcagcaatcttcatgaccgccacaccacccggcagcatcgatccatttccccagagcaactcccctatcgaggacatcgagcgggagatcccagagagatcttggaatacaggcttcgactggatcaccgattatcagggcaagacagtgtggtttgtgcccagcatcaaggccggcaacgacatcgccaattgcctgaggaagtctggcaagcgcgtgatccagctgagccggaagaccttcgatacagagtaccctaagaccaagctgacagactgggatttcgtggtgacaaccgacatctccgagatgggcgccaactttcgggccggcagagtgatcgatccaaggcgctgtctgaagcccgtgatcctgacagacggaccagagagagtgatcctggcaggacctatcccagtgacccctgcctccgccgcacagcggagaggcaggatcggccgcaatccagcccaggaggacgatcagtacgtgttctctggcgatcccctgaagaacgacgaggatcacgcccactggaccgaggccaagatgctgctggacaatatctatacccccgagggcatcatccctacactgtttggcccagagagggagaagacacaggcaatcgacggagagttcaggctgaggggagagcagcgcaagacctttgtggagctgatgaggaggggcgatctgcccgtgtggctgagctacaaggtggcctctgccggcatcagctataaggacagggagtggtgcttcacaggcgagcgcaacaatcagatcctggaggagaacatggaggtggagatctggacccgggagggcgagaagaagaagctgcggcccaagtggctggacgccagagtgtacgccgaccctatggccctgaaggacttcaaggagtttgcctccggcagaaagtctatcaccctggacatcctgaccgagatcgccaccctgcctacatacctgtcctctaaggccaagctggccctggacaacatcgtgatgctgcacacaaccgagaagggcggcagggcctatcagcacgccctgaatgagctgccagagagcctggagacactgatgctggtggccctgctgggcgccctgaccgcaggcatctttctgttctttatgcagggcaagggcatcggcaagctgagcatgggcctgatcgccatcgcagtggcctccggcctgctgtgggtggcagagatccagccacagtggatcgcagcctccatcatcctggagttctttctgatggtgctgctgatccccgagcctgagaagcagcgcacccctcaggataaccagctgatctacgtgatcctgaccatcctgacaatcatcggcctgatcgccgccaatgagatgggcctgatcgagaagaccaagacagacttcggcttttaccaggtgaagaccgagacaaccatcctggacgtggatctgaggcccgccagcgcctggacactgtatgcagtggccacaaccatcctgacccctatgctgcgccacaccatcgagaacacaagcgccaatctgtccctggccgcaatcgcaaaccaggcagccgtgctgatgggcctgggcaagggatggccactgcacaggatggacctgggcgtgcctctgctggctatgggctgctactctcaagtgaatcccacaaccctgaccgccagcctggtcatgctgctggtgcactatgccatcatcggacctggcctgcaggcaaaggcaaccagggaggcacagaagagaacagcagcaggcatcatgaagaacccaacagtggatggcatcaccgtgatcgacctggagcccatcagctacgaccctaagttcgagaagcagctgggccaggtcatgctgctggtgctgtgcgtgggccagctgctgctgatgagaacaacctgggcactgtgcgaggtgctgaccctggccacaggaccaatcatgacactgtgggagggcaaccccggccggttttggaatacaaccatcgccgtgtccaccgccaacatcttcagaggctcttatctggcaggagcaggcctggccttttccctgatcaagaatgcccagacacctaggagaggcaccggcacaaccggagagacactgggagagaagtggaagaggcagctgaacagcctggaccgcaaggagttcgaggagtacaagcggtccggcatcctggaggtggatagaaccgaggcaaagagcgccctgagggacggctccaagatcaagcacgccgtgagccggggcagctccaagatcaggtggatcgtggagcgcggcatgatcaagcccaagggcaaggtggtggatctgggatgcggaagaggaggatggtcctactatatggccacactgaagaacgtgaccgaggtgaagggctacacaaagggaggacctggacacgaggagccaatccctatggccacctacggctggaatctggtgaagctgcacagcggcgtggacgtgttctataagccaacagagcaggtggacaccctgctgtgcgacatcggcgagtctagctccaaccccaccatcgaggagggccggacactgagagtgctgaagatggtggagccttggctgtctagcaagccagagttttgcatcaaggtgctgaatccttacatgccaaccgtgatcgaggagctggagaagctgcagaggcgccacggcggctctctggtgcggtgtccactgagcagaaactccacacacgagatgtattgggtgtctggcgccagcggcaacatcgtgtcctctgtgaataccatcagcaagatgctgctgaataggttcacaacccggcacagaaagcctacatacgagaaggacgtggatctgggagcaggcacccgctctgtgagcaccgagacagagaagccagatatgaccatcatcggccggagactgcagaggctgagggaggagcacaaggagacatggcactacgaccaggagaacccttataggacctgggcctaccacggcagctatgaggcaccatccacaggcagcgccagcagcatggtgaatggcgtggtgaagctgctgaccaagccctgggatgtgatccctatggtgacacagctggccatgaccgacacaacccctttcggccagcagagagtgtttaaggagaaggtggacaccaggacacctcagccaaagcccggcacccgcatgatcatgaccatgacagccaactggctgtgggccctgctgggcaagaagaagagcccaaggctgtgcacccgcgaggagttcatctctaaggtgcgcagcaacgcagcaatcggagccgtgtttcaggaggagcagggatggacctccgcctctgaggccgtgaatgatagccggttctgggagctggtggacaaggagagagccctgcaccaggagggcaagtgcgagtcctgcgtgtacaatatgatgggcaagcgggagaagaagctgggcgagtttggaagggcaaagggctctcgcgccatctggtatatgtggctgggcgccagattcctggagtttgaggccctgggcttcctgaacgaggatcactggtttagccgggagaatagctggtccggagtggagggagagggcctgcacagactgggctacatcctggaggacatcgataagaaggacggcgatctgatctatgcagacgataccgcaggatgggacaccaggatcacagaggacgatctgctgaacgaggagctgatcaccgagcagatggccccccaccacaagacactggccaaggccatcttcaagctgacctatcagaataaggtggtgaaggtgctgcggcctacaccaaagggcgccgtgatggacatcatctctcggaaggaccagagaggcagcggacaagtgggcacctacggcctgaacacctttacaaatatggaggtgcagctgatcagacagatggaggccgagggcgtgatcacccaggacgatatgcagaacccacggggcctgaaggagagagtggagaagtggctgaaggagtgcggcgtggataggctgaagcgcatggccatcagcggcgacgattgcgtggtgaagcccatcgacgagaggttctctaccagcctgctgtttctgaacgatatgggcaaggtgcgcaaggacatcccacagtgggagccctccaagggctggaagaattggcaggaggtgccattctgctctcaccacttccacaagatctttatgaaggatggccggagcctggtggtgccctgtagaaaccaggacgagctgatcggaagggcaagaatctctcagggagcaggatggagcctgagagagacagcctgcctgggcaaggcctacgcccagatgtggtccctgatgtatttccacaggcgcgatctgcggctggcctctatggccatctgtagcgccgtgcctacagagtggtttccaacctccagaacaacctggtctatccacgcccaccaccagtggatgacaaccgaggacatgctgaaagtgtggaatagggtgtggatcgaggataacccaaatatgaccgacaagacacccgtgcactcttgggaggacatcccctatctgggcaagagggaggacctgtggtgcggatccctgatcggcctgtctagccgcgccacctgggccaagaacatccacaccgccatcacacaggtgcgcaatctgatcggcaaggaggagtacgtggattacatgcccgctatgaaaagatactccgctccatttgaaagtgagggggtcctgtgattattgacaacaaacaccaaagagaccattgaagtcaggccacttgtgccacggcttgagcaaaccgtgctgcctgtagctccgccaataatgggaggcgtaaaattcccagggaggccatgcgccacggaagctgtacgcgtggcatattggactagcggttagaggagacccctcccatcactgacaaaacgcagcaaaaaagggggcccgaagccaggaggaagctgtacttctggtggaaggactagaggttagaggagacccccccaacacaaaaacagcatattgacgctgggaaagaccagagatcctgctgtctctgcaacatcaatccaggcacagagcgccacgagatggattggtgttgttgaatcaacaggttct

SEQ ID NO: 81 - RNA, 10164 nt, synthetic construct
  source 1..10164: mol_type = other RNA
atgaaccaacgaaaaaaggtggttagaccacctttcaatatgctgaaacgcgagagaaaccgcgtatcaacccctcaggggctggtcaagaggttctccaccggcctgttttctggcaagggccctctgaggatggtgctggccttcatcacatttctgcgcgtgctgagcatcccacctaccgcaggcatcctgaagcggtggggacagctgaagaagaacaaggccatcaagatcctgatcggcttcaggaaggagatcggccgcatgctgaacatcctgaatcggagaaggcgcagcacaatgaccctgctgtgcctgatcccaaccgtgatggccttccacctgtccacacgggacggcgagcctctgatgatcgtggccaagcacgagcggggcagaccactgctgtttaagaccacagagggcatcaataagtgtaccctgatcgctatggacctgggcgagatgtgcgaggacacagtgacctacaagtgtcccctgctggtgaacaccgagcctgaggacatcgattgctggtgtaatctgacatccacctgggtcatgtatggcacatgcacccagtctggcgagcggagaagggagaagcggtccgtggccctgaccccacactctggaatgggcctggagacacgggccgagacatggatgagctccgagggagcatggaagcacgcacagagggtggagagctggattctgaggaacccaggattcgcactgctggccggctttatggcctacatgatcggccagaccggcatccagaggacagtgttctttgtgctgatgatgctggtggcaccatcctatggcatgagatgcgtgggcgtgggcaatagagatttcgtggagggcgtgtctggaggagcatgggtggacctggtgctggagcacggaggatgcgtgaccacaatggcccagggcaagcctacactggattttgagctgaccaagaccacagccaaggaggtggccctgctgcggacctactgcatcgaggcctccatctctaacatcaccacagccaccagatgtcctacacagggcgagccataccttaaggaggagcaggaccagcagtatatctgccgccgggacgtggtggataggggatggggcaatggatgtggcctgttcggcaagggaggagtggtgacatgcgccaagttcctgtgctccggcaagatcaccggcaacctggtgcagatcgagaatctggagtataccgtggtggtgacagtgcacaacggcgatacccacgccgtgggcaacgacacatccaatcacggcgtgacagccaccatcacaccccggagcccttccgtggaggtgaagctgcccgattacggcgagctgaccctggactgcgagcctagatctggcatcgatttcaacgagatgatcctgatgaagatgaagaagaagacctggctggtgcacaagcagtggtttctggatctgcctctgccctggagcgccggagcagacacctccgaggtgcactggaattacaaggagaggatggtgacattcaaggtgccccacgcaaagaggcaggacgtgaccgtgctgggcagccaggagggagcaatgcactccgccctggccggagccaccgaggtggacagcggcgatggcaaccacatgttcgccggccacctgaagtgcaaggtgcggatggagaagctgagaatcaagggcatgtcctacacaatgtgcagcggcaagttttccatcgataaggagatggccgagacacagcacggcaccacagtggtgaaggtgaagtatgagggagcaggagcaccttgtaaggtgcctatcgagatccgggacgtgaacaaggagaaggtggtgggcagaatcatctctagcacccccttcgccgagaacaccaatagcgtgacaaatatcgagctggagccaccctttggcgatagctacatcgtgatcggagtgggcgactccgccctgacactgcactggttcagaaagggctcctctatcggcaagatgtttgagtccacctatcggggcgccaagaggatggctatcctgggcgagaccgcatgggacttcggcagcgtgggaggcctgtttaccagcctgggcaaggccgtgcaccaggtgttcggctccgtgtataccacaatgtttggcggcgtgtcttggatgatcagaatcctgatcggcttcctggtgctgtggatcggcaccaactctcgcaatacaagcatggccatgacctgcatcgccgtgggcggcatcacactgttcctgggctttaccgtgcaggccgatatgggctgcgtggtgagctggaacggcaaggagctgaagtgtggctccggcatcttcgtggtggacaatgtgcacacctggacagagcagtacaagtttcagccagagtctccagcaaggctggccagcgccatcctgaacgcccacaaggattcagtgtgcggcatcaggagcaccacacgcctggagaatgtgatgtggaagcagatcacaaacgagctgaattatgtgctgtgggagggaggacacgatctgaccgtggtggcaggcgacgtgaagggcgtgctgaccaagggcaagagggccctgacacctccagtgaacgacctgaagtactcctggaagacatggggcaaggccaagatcttcacccccgaggcccgcaattctacatttctgatcgacggccccgataccagcgagtgccctaacggcagaagggcctggaatttcctggaggtggaggattatggcttcggcatgtttaccacaaacatctggatgaagtttagggagggcagctccgaggtgtgcgaccacaggctgatgtccgccgccatcaaggatcagaaggccgtgcacgccgacatgggctactggatcgagtctagcaagaatcagacatggcagatcgagaaggcctctctgatcgaggtgaagacctgcctgtggcctaagacccacacactgtggagcaacggcgtgctggagtctcagatgctgatcccacggagctacgccggacccttctcccagcacaattacagacagggatatgcaacccagacagcaggaccctggcacctgggcaagctggagatcgattttggcgagtgccctggcaccacagtgaccatccaggaggactgtgatcacaggggaccatccctgcgtacgacaaccgcctctggcaagctggtgacccagtggtgctgtaggagctgcacaatgccacctctgcgcttcctgggagaggacggctgttggtatggcatggagatccggcccctgtctgagaaggaggagaacatggtgaagagccaggtgaccgcaggacagggcacctccgagacattctctatgggcctgctgtgcctgacactgtttgtggaggagtgtctgcgccggagagtgaccagaaagtacatgatgctggtggtggtcatcaccttctgtgccatcatcctgggcggcctgacctggatggatctgctgagggccctgatcatgctgggcgacaccatgtccggaaggatcggaggacagatccacctggccatcatggccgtgttcaagatgtcccctggctacgtgctgggcgtgtttctgcggaagctgaccagccgggagacagccctgatggtcatcggcatggccatgacaaccgtgttctctatcccacacgacctgatggagctgatcgatggcatcagcctgggcctgatcctgctgaggatcgtgacccacttcgacaacacccaagtgggcaccctggccctgagcctgaccttcatccggagcacaacccctctggtcatggcctggagaaccatcatggccgtgttctttgtggtgaccctgatcccactgtgccgcacatcctgtctgcagaagcagtctcactgggtggagatcacagccctgatcctgggagcacaggccctgcccgtgtacctgatgaccctgatgaagggcgcctccaggcgctcttggccactgaacgagggcatcatggcagtgggcctggtgagcctgctgggctccgccctgctgaagaatgatgtgccactggccggacctatggtggcaggaggcctgctgctggccgcctacgtgatgagcggctcctctgccgacctgtccctggagaaggccgccaacgtgcagtgggacgagatggccgacatcaccggcagctcccccatcatcgaggtgaagcaggacgaggatggctctttcagcatcagggatgtggaggagacaaatatgatcacactgctggtgaagctggccctgatcaccgtgagcggcctgtaccctctggccatcccagtgacaatggccctgtggtatatctggcaggtgaagacccagcggagcggcgccctgtgggacgtgccatctcctgcagcaacccagaaggccacactgagcgagggcgtgtatcggatcatgcagagaggcctgttcggcaagacccaagtgggcgtgggcatccacatggagggcgtgtttcacacaatgtggcacgtgaccaggggctccgtgatctgccacgagacaggccgcctggagccatcctgggcagacgtgcggaacgatatgatctcttacggcggaggatggaggctgggcgacaagtgggataaggaggaggatgtgcaggtgctggccatcgagcccggcaagaatcctaagcacgtgcagaccaagcctggcctgttcaagaccctgacaggagagatcggagcagtgaccctggactttaagcctggtacctccggctctccaatcatcaacaagaagggcaaagtgatcggcctgtacggcaatggcgtggtgacaaagagcggcgattacgtgagcgccatcacccaggcagagaggatcggagagccagactatgaggtggacgaggacatcttccggaagaagcggctgacaatcatggatctgcaccctggcgccggcaagaccaagagaatcctgccaagcatcgtgcgcgaggccctgaagcggagactgcggacactgatcctggcaccaaccagagtggtggcagcagagatggaggaggccctgaggggcctgccaatccgctaccagacccctgccgtgaagtccgagcacacaggcagagagatcgtggacctgatgtgccacgccaccttcacaaccaggctgctgtctagcacacgcgtgccaaactacaatctgatcgtgatggacgaggcccactttacagatccctgtagcgtggccgccagaggctatatctccaccagagtggagatgggagaggcagcagcaatcttcatgaccgccacaccacccggcagcatcgatccatttccccagagcaactcccctatcgaggacatcgagcgggagatcccagagagatcttggaatacaggcttcgactggatcaccgattatcagggcaagacagtgtggtttgtgcccagcatcaaggccggcaacgacatcgccaattgcctgaggaagtctggcaagcgcgtgatccagctgagccggaagaccttcgatacagagtaccctaagaccaagctgacagactgggatttcgtggtgacaaccgacatctccgagatgggcgccaactttcgggccggcagagtgatcgatccaaggcgctgtctgaagcccgtgatcctgacagacggaccagagagagtgatcctggcaggacctatcccagtgacccctgcctccgccgcacagcggagaggcaggatcggccgcaatccagcccaggaggacgatcagtacgtgttctctggcgatcccctgaagaacgacgaggatcacgcccactggaccgaggccaagatgctgctggacaatatctatacccccgagggcatcatccctacactgtttggcccagagagggagaagacacaggcaatcgacggagagttcaggctgaggggagagcagcgcaagacctttgtggagctgatgaggaggggcgatctgcccgtgtggctgagctacaaggtggcctctgccggcatcagctataaggacagggagtggtgcttcacaggcgagcgcaacaatcagatcctggaggagaacatggaggtggagatctggacccgggagggcgagaagaagaagctgcggcccaagtggctggacgccagagtgtacgccgaccctatggccctgaaggacttcaaggagtttgcctccggcagaaagtctatcaccctggacatcctgaccgagatcgccaccctgcctacatacctgtcctctaaggccaagctggccctggacaacatcgtgatgctgcacacaaccgagaagggcggcagggcctatcagcacgccctgaatgagctgccagagagcctggagacactgatgctggtggccctgctgggcgccctgaccgcaggcatctttctgttctttatgcagggcaagggcatcggcaagctgagcatgggcctgatcgccatcgcagtggcctccggcctgctgtgggtggcagagatccagccacagtggatcgcagcctccatcatcctggagttctttctgatggtgctgctgatccccgagcctgagaagcagcgcacccctcaggataaccagctgatctacgtgatcctgaccatcctgacaatcatcggcctgatcgccgccaatgagatgggcctgatcgagaagaccaagacagacttcggcttttaccaggtgaagaccgagacaaccatcctggacgtggatctgaggcccgccagcgcctggacactgtatgcagtggccacaaccatcctgacccctatgctgcgccacaccatcgagaacacaagcgccaatctgtccctggccgcaatcgcaaaccaggcagccgtgctgatgggcctgggcaagggatggccactgcacaggatggacctgggcgtgcctctgctggctatgggctgctactctcaagtgaatcccacaaccctgaccgccagcctggtcatgctgctggtgcactatgccatcatcggacctggcctgcaggcaaaggcaaccagggaggcacagaagagaacagcagcaggcatcatgaagaacccaacagtggatggcatcaccgtgatcgacctggagcccatcagctacgaccctaagttcgagaagcagctgggccaggtcatgctgctggtgctgtgcgtgggccagctgctgctgatgagaacaacctgggcactgtgcgaggtgctgaccctggccacaggaccaatcatgacactgtgggagggcaaccccggccggttttggaatacaaccatcgccgtgtccaccgccaacatcttcagaggctcttatctggcaggagcaggcctggccttttccctgatcaagaatgcccagacacctaggagaggcaccggcacaaccggagagacactgggagagaagtggaagaggcagctgaacagcctggaccgcaaggagttcgaggagtacaagcggtccggcatcctggaggtggatagaaccgaggcaaagagcgccctgagggacggctccaagatcaagcacgccgtgagccggggcagctccaagatcaggtggatcgtggagcgcggcatgatcaagcccaagggcaaggtggtggatctgggatgcggaagaggaggatggtcctactatatggccacactgaagaacgtgaccgaggtgaagggctacacaaagggaggacctggacacgaggagccaatccctatggccacctacggctggaatctggtgaagctgcacagcggcgtggacgtgttctataagccaacagagcaggtggacaccctgctgtgcgacatcggcgagtctagctccaaccccaccatcgaggagggccggacactgagagtgctgaagatggtggagccttggctgtctagcaagccagagttttgcatcaaggtgctgaatccttacatgccaaccgtgatcgaggagctggagaagctgcagaggcgccacggcggctctctggtgcggtgtccactgagcagaaactccacacacgagatgtattgggtgtctggcgccagcggcaacatcgtgtcctctgtgaataccatcagcaagatgctgctgaataggttcacaacccggcacagaaagcctacatacgagaaggacgtggatctgggagcaggcacccgctctgtgagcaccgagacagagaagccagatatgaccatcatcggccggagactgcagaggctgagggaggagcacaaggagacatggcactacgaccaggagaacccttataggacctgggcctaccacggcagctatgaggcaccatccacaggcagcgccagcagcatggtgaatggcgtggtgaagctgctgaccaagccctgggatgtgatccctatggtgacacagctggccatgaccgacacaacccctttcggccagcagagagtgtttaaggagaaggtggacaccaggacacctcagccaaagcccggcacccgcatgatcatgaccatgacagccaactggctgtgggccctgctgggcaagaagaagagcccaaggctgtgcacccgcgaggagttcatctctaaggtgcgcagcaacgcagcaatcggagccgtgtttcaggaggagcagggatggacctccgcctctgaggccgtgaatgatagccggttctgggagctggtggacaaggagagagccctgcaccaggagggcaagtgcgagtcctgcgtgtacaatatgatgggcaagcgggagaagaagctgggcgagtttggaagggcaaagggctctcgcgccatctggtatatgtggctgggcgccagattcctggagtttgaggccctgggcttcctgaacgaggatcactggtttagccgggagaatagctggtccggagtggagggagagggcctgcacagactgggctacatcctggaggacatcgataagaaggacggcgatctgatctatgcagacgataccgcaggatgggacaccaggatcacagaggacgatctgctgaacgaggagctgatcaccgagcagatggccccccaccacaagacactggccaaggccatcttcaagctgacctatcagaataaggtggtgaaggtgctgcggcctacaccaaagggcgccgtgatggacatcatctctcggaaggaccagagaggcagcggacaagtgggcacctacggcctgaacacctttacaaatatggaggtgcagctgatcagacagatggaggccgagggcgtgatcacccaggacgatatgcagaacccacggggcctgaaggagagagtggagaagtggctgaaggagtgcggcgtggataggctgaagcgcatggccatcagcggcgacgattgcgtggtgaagcccatcgacgagaggttctctaccagcctgctgtttctgaacgatatgggcaaggtgcgcaaggacatcccacagtgggagccctccaagggctggaagaattggcaggaggtgccattctgctctcaccacttccacaagatctttatgaaggatggccggagcctggtggtgccctgtagaaaccaggacgagctgatcggaagggcaagaatctctcagggagcaggatggagcctgagagagacagcctgcctgggcaaggcctacgcccagatgtggtccctgatgtatttccacaggcgcgatctgcggctggcctctatggccatctgtagcgccgtgcctacagagtggtttccaacctccagaacaacctggtctatccacgcccaccaccagtggatgacaaccgaggacatgctgaaagtgtggaatagggtgtggatcgaggataacccaaatatgaccgacaagacacccgtgcactcttgggaggacatcccctatctgggcaagagggaggacctgtggtgcggatccctgatcggcctgtctagccgcgccacctgggccaagaacatccacaccgccatcacacaggtgcgcaatctgatcggcaaggaggagtacgtggattacatgcccgctatgaaaagatactccgctccatttgaaagtgagggggtcctgtga

SEQ ID NO: 82 - RNA, 11022 nt, synthetic construct
  source 1..11022: mol_type = other RNA
agtagttcgcctgtgtgagctgacaaacttagtagtgtttgtgaggattttgaacaattaacacagtgcgagctgtttcttagcacgaagatctcgatgtctaagaaaccaggagggcccggcaaaagccgggctgtcaatatgctaaaacgcggaatgccccgcgtgttgagtctgaccggactgaagcgggccatgctgagcctgatcgacggccgcggccctacacggttcgtgctggccctgctggcctttttccggttcacagcaattgccccaacacgggccgtgctggatcgctggcggagcgtgaacaagcagaccgccatgaagcacctgctgtcttttaagaaggagctgggcacactgacaagcgccatcaatcggagaagcagcaagcagaagaagcggggcggcaagacaggcatcgccttcatgatcggcctgatcgccggcgtgggcgccgtgacactgtctaactttcagggcaaggtaatgatgaccgtgaatgccacagacgtgaccgacatcatcacaatccccacagccgccggcaagaatctgtgcatcgtgagagccatggatgtgggccacatgtgcgatgataccatcacctacgagtgtccagtgctgtctgccggcaatgatcctgaggacatcgactgttggtgtaccaagctggccgtgtacgtgaggtacggccgctgcaccaagacacggcacagcaggcgcagccgcagaagcctgaccgtgcagacacacggcgagagcaccctgagcaataagaagggcgcctggatggacagcacaaaggccacccgctacctggtgaagacagagtcctggatactgagaaatcccggctatgccctggtggccgccgtgatcggctggatgctgggcagcaataccatgcagcgcgtggtgtttgccgtgctgctgctgctggtggcccccgcctatagcttcaactgcctgggcatgtctaaccgcgattttctggagggcgtgtccggcgccacatgggtggacctggtgctggagggcgactcttgtgtgaccatcatgagcaaggataagcccaccatcgacgtgaagatgatgaacatggaggccgccaacctggccgaggtgcgctcctattgttacctggccacagtgtctgagctgtctacaaaggccgcctgtcccacaatgggcgaggcccacaacgacaagagggccgacccctcctttgtatgcaagcagggcgtggtggaccggggctggggcaatggctgtggcctgttcggcaagggcagcatcgatacatgcgccaagtttgcctgttctaccaaggccacaggccgcaccatcctgaaggagaatatcaagtacgaggtggccatctttgtgcacggccccaccaccgtggagagccacggcaattacttcacccagacaggcgccgcccaggccggcaggttctctatcacacccgccgccccctcttacacccttaagctgggcgagtatggcgaggtgaccgtggattgcgagccacgcagcggcatcgatacaagcgcctattacgtgatgacagtgggcaccaagacctttctggtgcaccgcgagtggttcatggatctgaatctgccctggtccagcgccgagagcaatgtatggcgcaatcgggagacactgatggagtttgaggagcctcacgccacaaagcagagcgtgatcgccctgggcagccaggagggcgccctgcaccaggccctggccggcgccatccccgtggagttttctagcaacaccgtgaagctgacaagcggccacctgaagtgcagagtgaagatggagaagctgcagctgaagggcacaacctacggcgtgtgcagcaaggccttccggttcctgggcacccctgccgataccggccacggcaccgtggtgctggagctgcagtataccggcaccgatggcccctgcaagatccccatctcttccgtggccagcctgaatgatctgacacccgtgggccgcctggtgacagtgaatcctttcgtgtccgtgtctaccgccaacgccaaggtgctgatcgagctggagcccccctttggcgatagctatatcgtggtgggccgcggcgagcagcagatcaaccaccactggcacaagagcggctcttctatcggcaaggccttcacagccaccctgaagggcgcccagagactggccgccctgggcgatacagcctgggacttcggctctgtgggcggcgtgtttaccagcgtgggcaaggccgtgcaccaggtgtttggcggcgcctttaggtccctgtttggcggcatgagctggatcacccagggcctgctgggcgccctgctgctgtggatgggcatcaacgcccgcgatagatccatcgccctgaccttcctggccgtgggcggcgtgctgctgttcctgtccgtgaacgtgcacgccgacaccggctgcgccatcgacatctctaggcaggagctgagatgtggcagcggcgtgtttatccacaacgatgtggaggcctggatggaccgatataagtattatcccgagacaccccagggcctggccaagatcatccagaaggcccacaaggagtcagtgtgcggcctgcgctccgtgagcagactggagcaccagatgtgggaggccgtgaaggacgagctgaacaccctgctgaaggagaatggcgtggatctgagcatcgtggtggagaagcaggagggcatgtataagagcgccccccggcggctgaccgccacaaccgagaagctggagatcggctggaaggcctggggcaagagcatcctgtttgcccccgagctggccaacaatacctttgtgatcgatggccccgagaccaaggagtgccccacccagaaccgcgcctggaactctctggaggtggaggactttggcttcggcctgaccagcacccgcatgtttctgcgcgtgagagagagcaatacaacagagtgtgatagcaagatcatcggcacagccgtgaagaacaatctggccatccacagcgacctgagctattggatcgagagccgctttaacgacacatggaagctggagcgcgccgtgctgggcgaggtgaagagctgtacctggcccgagacccacacactgtggggcgatggcgtgctggagtctgacctgatcatcccaatcacactggccggccctcgcagcaaccacaaccgccgcccaggctataagacccagtcccagggcccctgggacgagggccgggtggagatcgacttcgattactgccccggcacaaccgtgacactgagcgagtcttgtggccaccgcggccctgccacccggacaaccacagagtctggcaagctgatcaccgattggtgttgtcggtcctgcaccctgcctcctctgcggtatcagaccgacaatggctgttggtacggcatggagatcagaccccagcggcacgacgagaagacactggtgcagtcccaggtgaacgcctacaacgccgatatgatcgatccattccagctgggcctgctggtggtgttcctggccacccaggaggtgctgcgcaagcggtggacagccaagatcagcatgcctgccatcctgatcgccctgctggtgctggtgttcggcggcatcacctacaccgacgtgctgagatacgtgatcctggtgggcgccgccttcgccgagtccaacagcggcggcgatgtggtgcacctggccctgatggccacattcaagatccagcccgtgtttatggtggcctctttcctgaaggcccgctggaccaatcaggagaatatcctgctgatgctggccgccgcctttttccagatggcctattacgatgcccggcagatcctgctgtgggagatgcccgatgtgctgaactccctggccgtggcctggatgatcctgcgggccatcaccttcacaacaacatccaatgtggtggtgcctctgctggccctgctgacacccggcctgagatgtctgaatctggacgtgtataggatcctgctgctgatggtgggcatcggcagcctgatccgcgagaagcgcagcgccgccgccaagaagaagggcgccagcctgctgtgcctggccctggccagcaccggctttttcaaccccatgatcctggccgccggcctggtggcctgtgatcccaatcggaagcggggctggccagccacagaggtaatgacagccgtgggcctgatgttcgccatcgtgggcggcctggccgagctggacatcgatagcatggccatccctatgaccatcgccggcctgatgtttgccgcctttgtgatcagcggcaagagcaccgacatgtggatcgagcggaccgccgacatcagctgggagggcgatgccgagatcacaggctctagcgagcgggtggatgtgcggctggacgatgacggcaacttccagctgatgaacgatccaggcgccccctggaagatatggatgctgcggatggcctgcctggccatcagcgcctacaccccctgggccatcctgccctccgtggtgggcttttggatcaccctgcagtacaccaagcggggcggcgtgctgtgggatacaccttctcccaaggagtataagcgcggcgataccaccaccggcgtgtatcgcatcatgacacgcggcctgctgggcagctaccaggccggcgccggcgtgatggtggagggcgtgttccacaccctgtggcacaccaccaagggcgccgccctgatgtccggcgagggcaggctggacccctattggggctccgtgaaggaggaccggctgtgctatggcggcccctggaagctgcagcacaagtggaacggccaggatgaggtgcagatgatcgtggtggagcccggcaagaatgtgaagaacgtgcagacaaagcccggcgtgtttaagacacctgagggcgagatcggcgccgtgacactggacttccccaccggcacctccggctctcccatcgtggacaagaatggcgatgtgatcggcctgtatggcaatggcgtgatcatgcctaatggcagctacatctctgccatcgtgcagggcgagcggatggatgagccagtgcctgccggcttcgagcccgagatgctgcgcaagaagcagatcaccgtgctggacctgcacccaggcgccggcaagacccggcggatactgcctcagatcatcaaggaggccatcaatcggaggctgagaaccgccgtgctggcccctacaagggtggtggccgccgagatggccgaggccctgcggggcctgcccatccgctaccagaccagcgccgtggccagagagcacaacggcaatgagatcgtggatgtgatgtgccacgccaccctgacccacagactgatgagccctcacagagtgccaaactataatctgttcgtgatggatgaggcccacttcacagatccagccagcatcgccgcccgcggctacatctctaccagagtggagctgggcgaggccgccgccatctttatgaccgccaccccacctggcacatccgatccatttcccgagtccaatgcccctatctctgacctgcagacagagatccccgacagagcctggaatagcggctacgagtggatcaccgagtatatcggcaagaccgtgtggtttgtgccctctgtgaagatgggcaatgagatcgccctgtgcctgcagagagccggcaagaaggtaatccagctgaatcggaagtcgtacgagaccgagtatcccaagtgcaagaacgatgactgggacttcgtggtgaccacagacatctctgagatgggcgccaacttcaaggccagccgcgtgatcgactctcggaagtccgtgaagcctaccatcatcaccgagggcgagggccgggtaatcctgggcgagccttctgccgtgaccgccgccagcgccgcccagcgccgcggccggatcggccggaaccctagccaggtgggcgatgagtactgttatggcggccacaccaatgaggatgacagcaactgtgcccactggaccgaggcccgcatcatgctggataacatcaacatgcccaacggcctgatcgcccagttttatcagccagagcgcgagaaggtgtatacaatggatggcgagtaccgcctgagaggcgaggagcggaagaatttcctggagctgctgcgcaccgccgatctgcccgtgtggctggcctataaggtggccgccgccggcgtgagctatcacgaccgccgctggtgctttgacggccctaggacaaatacaatcctggaggataacaatgaggtggaggtaatcaccaagctgggcgagcggaagatcctgagacccagatggatcgacgccagggtgtactctgatcaccaggccctgaagagcttcaaggactttgccagcggcaagcgcagccagatcggctttatcgaggtgctgggcaagatgcccgagcactttatgggcaagacctgggaggccctggataccatgtatgtggtggccacagccgagaagggcggcagagcccaccggatggccctggaggagctgcccgatgccctgcagaccatcgccctgatcgccctgctgtctgtgatgacaatgggcgtgtttttcctgctgatgcagcggaagggcatcggcaagatcggcctgggcggcgtggtgctgggcgccgccaccttcttctgttggatggccgaggtgcctggcaccaagatcgccggcatgctgctgctgtctctgctgctgatgatcgtgctgatccccgagcctgagaagcagcggagccagacagacaaccagctggccgtgttcctgatctgcgtgctgaccctggtgggcgccgtggccgccaacgagatgggctggctggacaagaccaagtctgacatctctggcctgtttggccagcggatcgagaccaaggagaatttttccatcggcgagtttctgctggacctgcgccccgccaccgcctggagcctgtatgccgtgacaacagccgtgctgacaccactgctgaagcacctgatcacctccgattacatcaacaccagcctgacatccatcaacgtgcaggccagcgccctgtttaccctggcccgcggctttccctttgtggacgtgggcgtgagcgccctgctgctggccgccggctgttggggccaggtgaccctgaccgtgacagtgacatccgccacactgctgttttgtcactacgcctatatggtgcctggctggcaggccgaggccatgaggtccgcccagagacgcaccgccgccggcatcatgaagaacgccgtggtggatggcatcgtggccacagacgtgcccgagctggagcggaccacacccatcatgcagaagaaggtgggccaggtaatgctgatcctggtgagcctggccgccctggtggtgaaccccagcgtgaagacagtgcgcgaggccggcatcctgatcacagccgccgccgtgacactgtgggagaatggcgcctccagcgtgtggaatgccaccacagccatcggcctgtgccacatcatgcggggcggctggctgagctgcctgagcatcacctggaccctggtgaagaacatggagaagcctggcctgaagcggggcggcgccaagggccggaccctgggcgaggtgtggaaggagcgcctgaatcagatgacaaaggaggagtttatccggtacagaaaggaggccatcaccgaggtggaccgctctgccgccaagcacgcccggaaggagaggaacatcaccggcggccaccccgtgagccgcggcacagccaagctgcggtggctggtggagcgccgctttctggagcctgtgggcaaggtaatcgatctgggctgtggccgcggcggctggtgttactacatggccacccagaagcgggtgcaggaggtgaggggctataccaagggcggccccggccacgaggagccccaactagtgcagtcctacggctggaatatcgtgacaatgaagtccggcgtggatgtattctacaggccttccgagtgctgcgatacactgctgtgcgacatcggcgagagcagctctagcgccgaggtggaggagcaccggacactgcgggtgctggagatggtggaggattggctgcaccggggcccaaaggagttctgcgtgaaggtgctgtgcccctatatgcctaaggtaatcgagaagatggagctgctgcagaggcgctatggcggcggcctggtgagaaatccactgtcccgcaatagcacccacgagatgtactgggtgtctcgggcctccggcaacgtggtgcactccgtgaatatgacaagccaggtgctgctgggccgcatggagaagaagacatggaagggcccccagtacgaggaggatgtgaatctgggctccggcacaagagccgtgggcaagccactgctgaatagcgataccagcaagatcaagaatcgcatcgagagactgcggcgcgagtatagcagcacatggcaccacgacgagaaccacccatatcgcacctggaactaccacggctcttatgaggtgaagccaaccggcagcgccagctctctggtgaatggcgtggtgcgcctgctgtccaagccctgggataccatcaccaatgtgaccacaatggccatgaccgacaccacacccttcggccagcagcgggtgtttaaggagaaggtggatacaaaggcccccgagccacctgagggcgtgaagtatgtgctgaatgagacaaccaactggctgtgggcctttctggccagggagaagagacccaggatgtgcagcagggaggagtttatcagaaaggtgaacagcaatgccgccctgggcgccatgttcgaggagcagaatcagtggcgctctgccagggaggccgtggaggaccccaagttttgggagatggtggatgaggagcgggaggcccacctgcgcggcgagtgtcacacctgcatctacaacatgatgggcaagcgggagaagaagcccggcgagttcggcaaggccaagggctctcgcgccatctggttcatgtggctgggcgcccgctttctggagttcgaggccctgggcttcctgaacgaggaccactggctgggccggaagaatagcggcggcggcgtggagggcctgggcctgcagaagctgggctacatcctgcgcgaggtgggcacacgccctggcggcaggatctatgccgatgataccgccggctgggatacacgcatcacacgggccgacctggagaacgaggccaaggtgctggagctgctggatggcgagcacagacggctggccagagccatcatcgagctgacctatcggcacaaggtggtgaaggtaatgcgccctgccgccgatggcaggaccgtgatggacgtgatcagccgggaggaccagcgcggcagcggccaggtggtgacctatgccctgaatacattcacaaatctggccgtgcagctggtgcgcatgatggagggcgagggcgtgatcggccccgacgatgtggagaagctgacaaagggcaagggccctaaggtgcggacctggctgtctgagaatggcgaggagcggctgagccggatggccgtgagcggcgatgattgcgtggtgaagccactggatgatcgctttgccacatccctgcactttctgaacgccatgtccaaggtgcgcaaggacatccaggagtggaagcccagcacaggctggtacgattggcagcaggtgcccttctgtagcaaccacttcaccgagctgatcatgaaggacggcagaaccctggtgaccccttgcaggggccaggatgagctggtgggccgcgcccgcatcagccctggcgccggctggaatgtgcgggacaccgcctgcctggccaagagctacgcccagatgtggctgctgctgtacttccaccgccgggacctgcggctgatggccaacgccatctgctctgccgtgcctgtgaattgggtgcccacaggcagaacaacctggagcatccacgccggcggcgagtggatgaccaccgaggacatgctggaggtgtggaacagagtgtggatcgaggagaacgagtggatggaggacaagacccccgtggagaagtggtctgatgtgccctacagcggcaagcgggaggacatctggtgtggcagcctgatcggcacacgcgcccgggccacatgggccgagaacatccaggtggccatcaaccaggtgcgcagcatcatcggcgatgagaagtatgtggactacatgagcagcctgaaaagatacgaagatactacactggtggaagataccgtcctgtgaatactttgttaattgtaaataaatattgttattatgtgtagaagtttagctttataatagtgtttagtgtgtttagagttagaaaaattttagtgaggaagtcaggccggaaaattcccgccaccggaagttgagtagacggtgctgcctgcgactcaaccccaggaggactgggtgaacaaagctgcgaagtgatccatgtaagccctcagaaccgtctcggaaagaggaccccacatgttgtagcttcaaggcccaatgtcagaccacgccatggcgtgccactctgcggagagtgcagtctgcgacagtgccccaggaggactgggtgaacaaaggcgaatcaacgtcccacgcggccctagctctggcaatggtgttaaccagagtgaaaggactagaggttagaggagaccccgcgttctgaagtgcacggcccagcctggctgaagctgtaggtcaggggaaggactagaggttagtggagaccccgtgccgcaaaacaccacaacaacacagcatattgacacctgggatagactaggagatcttctgctctgcacaaccagccacacggcacagtgcgccgacaatggtggctggtggtgcgagaacacaggatct

SEQ ID NO: 83 - RNA, 10302 nt, synthetic construct
  source 1..10302: mol_type = other RNA
atgtctaagaaaccaggagggcccggcaaaagccgggctgtcaatatgctaaaacgcggaatgccccgcgtgttgagtctgaccggactgaagcgggccatgctgagcctgatcgacggccgcggccctacacggttcgtgctggccctgctggcctttttccggttcacagcaattgccccaacacgggccgtgctggatcgctggcggagcgtgaacaagcagaccgccatgaagcacctgctgtcttttaagaaggagctgggcacactgacaagcgccatcaatcggagaagcagcaagcagaagaagcggggcggcaagacaggcatcgccttcatgatcggcctgatcgccggcgtgggcgccgtgacactgtctaactttcagggcaaggtaatgatgaccgtgaatgccacagacgtgaccgacatcatcacaatccccacagccgccggcaagaatctgtgcatcgtgagagccatggatgtgggccacatgtgcgatgataccatcacctacgagtgtccagtgctgtctgccggcaatgatcctgaggacatcgactgttggtgtaccaagctggccgtgtacgtgaggtacggccgctgcaccaagacacggcacagcaggcgcagccgcagaagcctgaccgtgcagacacacggcgagagcaccctgagcaataagaagggcgcctggatggacagcacaaaggccacccgctacctggtgaagacagagtcctggatactgagaaatcccggctatgccctggtggccgccgtgatcggctggatgctgggcagcaataccatgcagcgcgtggtgtttgccgtgctgctgctgctggtggcccccgcctatagcttcaactgcctgggcatgtctaaccgcgattttctggagggcgtgtccggcgccacatgggtggacctggtgctggagggcgactcttgtgtgaccatcatgagcaaggataagcccaccatcgacgtgaagatgatgaacatggaggccgccaacctggccgaggtgcgctcctattgttacctggccacagtgtctgagctgtctacaaaggccgcctgtcccacaatgggcgaggcccacaacgacaagagggccgacccctcctttgtatgcaagcagggcgtggtggaccggggctggggcaatggctgtggcctgttcggcaagggcagcatcgatacatgcgccaagtttgcctgttctaccaaggccacaggccgcaccatcctgaaggagaatatcaagtacgaggtggccatctttgtgcacggccccaccaccgtggagagccacggcaattacttcacccagacaggcgccgcccaggccggcaggttctctatcacacccgccgccccctcttacacccttaagctgggcgagtatggcgaggtgaccgtggattgcgagccacgcagcggcatcgatacaagcgcctattacgtgatgacagtgggcaccaagacctttctggtgcaccgcgagtggttcatggatctgaatctgccctggtccagcgccgagagcaatgtatggcgcaatcgggagacactgatggagtttgaggagcctcacgccacaaagcagagcgtgatcgccctgggcagccaggagggcgccctgcaccaggccctggccggcgccatccccgtggagttttctagcaacaccgtgaagctgacaagcggccacctgaagtgcagagtgaagatggagaagctgcagctgaagggcacaacctacggcgtgtgcagcaaggccttccggttcctgggcacccctgccgataccggccacggcaccgtggtgctggagctgcagtataccggcaccgatggcccctgcaagatccccatctcttccgtggccagcctgaatgatctgacacccgtgggccgcctggtgacagtgaatcctttcgtgtccgtgtctaccgccaacgccaaggtgctgatcgagctggagcccccctttggcgatagctatatcgtggtgggccgcggcgagcagcagatcaaccaccactggcacaagagcggctcttctatcggcaaggccttcacagccaccctgaagggcgcccagagactggccgccctgggcgatacagcctgggacttcggctctgtgggcggcgtgtttaccagcgtgggcaaggccgtgcaccaggtgtttggcggcgcctttaggtccctgtttggcggcatgagctggatcacccagggcctgctgggcgccctgctgctgtggatgggcatcaacgcccgcgatagatccatcgccctgaccttcctggccgtgggcggcgtgctgctgttcctgtccgtgaacgtgcacgccgacaccggctgcgccatcgacatctctaggcaggagctgagatgtggcagcggcgtgtttatccacaacgatgtggaggcctggatggaccgatataagtattatcccgagacaccccagggcctggccaagatcatccagaaggcccacaaggagtcagtgtgcggcctgcgctccgtgagcagactggagcaccagatgtgggaggccgtgaaggacgagctgaacaccctgctgaaggagaatggcgtggatctgagcatcgtggtggagaagcaggagggcatgtataagagcgccccccggcggctgaccgccacaaccgagaagctggagatcggctggaaggcctggggcaagagcatcctgtttgcccccgagctggccaacaatacctttgtgatcgatggccccgagaccaaggagtgccccacccagaaccgcgcctggaactctctggaggtggaggactttggcttcggcctgaccagcacccgcatgtttctgcgcgtgagagagagcaatacaacagagtgtgatagcaagatcatcggcacagccgtgaagaacaatctggccatccacagcgacctgagctattggatcgagagccgctttaacgacacatggaagctggagcgcgccgtgctgggcgaggtgaagagctgtacctggcccgagacccacacactgtggggcgatggcgtgctggagtctgacctgatcatcccaatcacactggccggccctcgcagcaaccacaaccgccgcccaggctataagacccagtcccagggcccctgggacgagggccgggtggagatcgacttcgattactgccccggcacaaccgtgacactgagcgagtcttgtggccaccgcggccctgccacccggacaaccacagagtctggcaagctgatcaccgattggtgttgtcggtcctgcaccctgcctcctctgcggtatcagaccgacaatggctgttggtacggcatggagatcagaccccagcggcacgacgagaagacactggtgcagtcccaggtgaacgcctacaacgccgatatgatcgatccattccagctgggcctgctggtggtgttcctggccacccaggaggtgctgcgcaagcggtggacagccaagatcagcatgcctgccatcctgatcgccctgctggtgctggtgttcggcggcatcacctacaccgacgtgctgagatacgtgatcctggtgggcgccgccttcgccgagtccaacagcggcggcgatgtggtgcacctggccctgatggccacattcaagatccagcccgtgtttatggtggcctctttcctgaaggcccgctggaccaatcaggagaatatcctgctgatgctggccgccgcctttttccagatggcctattacgatgcccggcagatcctgctgtgggagatgcccgatgtgctgaactccctggccgtggcctggatgatcctgcgggccatcaccttcacaacaacatccaatgtggtggtgcctctgctggccctgctgacacccggcctgagatgtctgaatctggacgtgtataggatcctgctgctgatggtgggcatcggcagcctgatccgcgagaagcgcagcgccgccgccaagaagaagggcgccagcctgctgtgcctggccctggccagcaccggctttttcaaccccatgatcctggccgccggcctggtggcctgtgatcccaatcggaagcggggctggccagccacagaggtaatgacagccgtgggcctgatgttcgccatcgtgggcggcctggccgagctggacatcgatagcatggccatccctatgaccatcgccggcctgatgtttgccgcctttgtgatcagcggcaagagcaccgacatgtggatcgagcggaccgccgacatcagctgggagggcgatgccgagatcacaggctctagcgagcgggtggatgtgcggctggacgatgacggcaacttccagctgatgaacgatccaggcgccccctggaagatatggatgctgcggatggcctgcctggccatcagcgcctacaccccctgggccatcctgccctccgtggtgggcttttggatcaccctgcagtacaccaagcggggcggcgtgctgtgggatacaccttctcccaaggagtataagcgcggcgataccaccaccggcgtgtatcgcatcatgacacgcggcctgctgggcagctaccaggccggcgccggcgtgatggtggagggcgtgttccacaccctgtggcacaccaccaagggcgccgccctgatgtccggcgagggcaggctggacccctattggggctccgtgaaggaggaccggctgtgctatggcggcccctggaagctgcagcacaagtggaacggccaggatgaggtgcagatgatcgtggtggagcccggcaagaatgtgaagaacgtgcagacaaagcccggcgtgtttaagacacctgagggcgagatcggcgccgtgacactggacttccccaccggcacctccggctctcccatcgtggacaagaatggcgatgtgatcggcctgtatggcaatggcgtgatcatgcctaatggcagctacatctctgccatcgtgcagggcgagcggatggatgagccagtgcctgccggcttcgagcccgagatgctgcgcaagaagcagatcaccgtgctggacctgcacccaggcgccggcaagacccggcggatactgcctcagatcatcaaggaggccatcaatcggaggctgagaaccgccgtgctggcccctacaagggtggtggccgccgagatggccgaggccctgcggggcctgcccatccgctaccagaccagcgccgtggccagagagcacaacggcaatgagatcgtggatgtgatgtgccacgccaccctgacccacagactgatgagccctcacagagtgccaaactataatctgttcgtgatggatgaggcccacttcacagatccagccagcatcgccgcccgcggctacatctctaccagagtggagctgggcgaggccgccgccatctttatgaccgccaccccacctggcacatccgatccatttcccgagtccaatgcccctatctctgacctgcagacagagatccccgacagagcctggaatagcggctacgagtggatcaccgagtatatcggcaagaccgtgtggtttgtgccctctgtgaagatgggcaatgagatcgccctgtgcctgcagagagccggcaagaaggtaatccagctgaatcggaagtcgtacgagaccgagtatcccaagtgcaagaacgatgactgggacttcgtggtgaccacagacatctctgagatgggcgccaacttcaaggccagccgcgtgatcgactctcggaagtccgtgaagcctaccatcatcaccgagggcgagggccgggtaatcctgggcgagccttctgccgtgaccgccgccagcgccgcccagcgccgcggccggatcggccggaaccctagccaggtgggcgatgagtactgttatggcggccacaccaatgaggatgacagcaactgtgcccactggaccgaggcccgcatcatgctggataacatcaacatgcccaacggcctgatcgcccagttttatcagccagagcgcgagaaggtgtatacaatggatggcgagtaccgcctgagaggcgaggagcggaagaatttcctggagctgctgcgcaccgccgatctgcccgtgtggctggcctataaggtggccgccgccggcgtgagctatcacgaccgccgctggtgctttgacggccctaggacaaatacaatcctggaggataacaatgaggtggaggtaatcaccaagctgggcgagcggaagatcctgagacccagatggatcgacgccagggtgtactctgatcaccaggccctgaagagcttcaaggactttgccagcggcaagcgcagccagatcggctttatcgaggtgctgggcaagatgcccgagcactttatgggcaagacctgggaggccctggataccatgtatgtggtggccacagccgagaagggcggcagagcccaccggatggccctggaggagctgcccgatgccctgcagaccatcgccctgatcgccctgctgtctgtgatgacaatgggcgtgtttttcctgctgatgcagcggaagggcatcggcaagatcggcctgggcggcgtggtgctgggcgccgccaccttcttctgttggatggccgaggtgcctggcaccaagatcgccggcatgctgctgctgtctctgctgctgatgatcgtgctgatccccgagcctgagaagcagcggagccagacagacaaccagctggccgtgttcctgatctgcgtgctgaccctggtgggcgccgtggccgccaacgagatgggctggctggacaagaccaagtctgacatctctggcctgtttggccagcggatcgagaccaaggagaatttttccatcggcgagtttctgctggacctgcgccccgccaccgcctggagcctgtatgccgtgacaacagccgtgctgacaccactgctgaagcacctgatcacctccgattacatcaacaccagcctgacatccatcaacgtgcaggccagcgccctgtttaccctggcccgcggctttccctttgtggacgtgggcgtgagcgccctgctgctggccgccggctgttggggccaggtgaccctgaccgtgacagtgacatccgccacactgctgttttgtcactacgcctatatggtgcctggctggcaggccgaggccatgaggtccgcccagagacgcaccgccgccggcatcatgaagaacgccgtggtggatggcatcgtggccacagacgtgcccgagctggagcggaccacacccatcatgcagaagaaggtgggccaggtaatgctgatcctggtgagcctggccgccctggtggtgaaccccagcgtgaagacagtgcgcgaggccggcatcctgatcacagccgccgccgtgacactgtgggagaatggcgcctccagcgtgtggaatgccaccacagccatcggcctgtgccacatcatgcggggcggctggctgagctgcctgagcatcacctggaccctggtgaagaacatggagaagcctggcctgaagcggggcggcgccaagggccggaccctgggcgaggtgtggaaggagcgcctgaatcagatgacaaaggaggagtttatccggtacagaaaggaggccatcaccgaggtggaccgctctgccgccaagcacgcccggaaggagaggaacatcaccggcggccaccccgtgagccgcggcacagccaagctgcggtggctggtggagcgccgctttctggagcctgtgggcaaggtaatcgatctgggctgtggccgcggcggctggtgttactacatggccacccagaagcgggtgcaggaggtgaggggctataccaagggcggccccggccacgaggagccccaactagtgcagtcctacggctggaatatcgtgacaatgaagtccggcgtggatgtattctacaggccttccgagtgctgcgatacactgctgtgcgacatcggcgagagcagctctagcgccgaggtggaggagcaccggacactgcgggtgctggagatggtggaggattggctgcaccggggcccaaaggagttctgcgtgaaggtgctgtgcccctatatgcctaaggtaatcgagaagatggagctgctgcagaggcgctatggcggcggcctggtgagaaatccactgtcccgcaatagcacccacgagatgtactgggtgtctcgggcctccggcaacgtggtgcactccgtgaatatgacaagccaggtgctgctgggccgcatggagaagaagacatggaagggcccccagtacgaggaggatgtgaatctgggctccggcacaagagccgtgggcaagccactgctgaatagcgataccagcaagatcaagaatcgcatcgagagactgcggcgcgagtatagcagcacatggcaccacgacgagaaccacccatatcgcacctggaactaccacggctcttatgaggtgaagccaaccggcagcgccagctctctggtgaatggcgtggtgcgcctgctgtccaagccctgggataccatcaccaatgtgaccacaatggccatgaccgacaccacacccttcggccagcagcgggtgtttaaggagaaggtggatacaaaggcccccgagccacctgagggcgtgaagtatgtgctgaatgagacaaccaactggctgtgggcctttctggccagggagaagagacccaggatgtgcagcagggaggagtttatcagaaaggtgaacagcaatgccgccctgggcgccatgttcgaggagcagaatcagtggcgctctgccagggaggccgtggaggaccccaagttttgggagatggtggatgaggagcgggaggcccacctgcgcggcgagtgtcacacctgcatctacaacatgatgggcaagcgggagaagaagcccggcgagttcggcaaggccaagggctctcgcgccatctggttcatgtggctgggcgcccgctttctggagttcgaggccctgggcttcctgaacgaggaccactggctgggccggaagaatagcggcggcggcgtggagggcctgggcctgcagaagctgggctacatcctgcgcgaggtgggcacacgccctggcggcaggatctatgccgatgataccgccggctgggatacacgcatcacacgggccgacctggagaacgaggccaaggtgctggagctgctggatggcgagcacagacggctggccagagccatcatcgagctgacctatcggcacaaggtggtgaaggtaatgcgccctgccgccgatggcaggaccgtgatggacgtgatcagccgggaggaccagcgcggcagcggccaggtggtgacctatgccctgaatacattcacaaatctggccgtgcagctggtgcgcatgatggagggcgagggcgtgatcggccccgacgatgtggagaagctgacaaagggcaagggccctaaggtgcggacctggctgtctgagaatggcgaggagcggctgagccggatggccgtgagcggcgatgattgcgtggtgaagccactggatgatcgctttgccacatccctgcactttctgaacgccatgtccaaggtgcgcaaggacatccaggagtggaagcccagcacaggctggtacgattggcagcaggtgcccttctgtagcaaccacttcaccgagctgatcatgaaggacggcagaaccctggtgaccccttgcaggggccaggatgagctggtgggccgcgcccgcatcagccctggcgccggctggaatgtgcgggacaccgcctgcctggccaagagctacgcccagatgtggctgctgctgtacttccaccgccgggacctgcggctgatggccaacgccatctgctctgccgtgcctgtgaattgggtgcccacaggcagaacaacctggagcatccacgccggcggcgagtggatgaccaccgaggacatgctggaggtgtggaacagagtgtggatcgaggagaacgagtggatggaggacaagacccccgtggagaagtggtctgatgtgccctacagcggcaagcgggaggacatctggtgtggcagcctgatcggcacacgcgcccgggccacatgggccgagaacatccaggtggccatcaaccaggtgcgcagcatcatcggcgatgagaagtatgtggactacatgagcagcctgaaaagatacgaagatactacactggtggaagataccgtcctgtga

SEQ ID NO: 84 - RNA, 10700 nt, synthetic construct
  source 1..10700: mol_type = other RNA
agttgttagtctgcgtggaccgacaagaacagtttcgactcggaagcttgcttaacgtagtgctaacagttttttattagagagcagatctctgatgaacaaccaacggaaaaagacgggaaaaccgtctatcaatatgctgaaacgcgtgagaaaccgtgtgtcaactggaagccagctggccaagcggttcagcaagggcctgctgaacggacagggacccatgaagctggtcatggccttcatcgcctttctgaggttcctggccatcccacctaccgcaggcgtgctggccagatggggcaccttcaagaagagcggcgccatcaaggtgctgaagggcttcaagcgggagatctctaacatgctgagcatcatcaataagagaaagaagacctctctgtgcctgatgatgatcctgccagccgccctggcctttcacctgacaagcagggacggcgagcctcgcatgatcgtgggcaagaacgagcggggcaagtccctgctgttcaagacagcctctggcatcaatatgtgcaccctgatcgccatggatctgggcgagatgtgcgacgataccgtgacatacaagtgtcctcacatcaccgaggtggagccagaggatatcgactgctggtgtaacctgacctctacatgggtgacctatggcacatgcaatcaggccggcgagcaccggagagacaagaggagcgtggccctggcccctcacgtgggcatgggcctggatacccgcacacagacctggatgtccgccgagggagcatggaggcaggtggagaaggtggagacatgggccctgagacaccccggctttacaatcctggccctgttcctggcccactacatcggcacctccctgacacagaaggtggtcatcttcatcctgctgatgctggtgacaccttctatgaccatgagatgcgtgggagtgggaaacagggacttcgtggagggcctgagcggagcaacctgggtggatgtggtgctggagcacggaggatgcgtgaccacaatggccaagaataagcccaccctggacatcgagctgcagaagaccgaggccacacagctggccacactgaggaagctgtgcatcgagggcaagatcaccaacatcaccacagatagcaggtgtccaacacagggagaggccgtgctgccagaggagcaggaccagaactacgtgtgcaagcacacgtacgtggatagaggctggggcaatggctgtggcctgtttggcaagggctccctggtgacatgcgccaagttccagtgtctggagctgatcgagggcaaggtggtgcagtacgagaacctgaagtataccgtgatcatcaccgtgcacacaggcgaccagcaccaagtgggcaatgagacacagggagtgaccgcagagatcacaccacaggccagcaccacagaggccatcctgcctgagtacggcaccctgggcctggagtgctccccccggaccggcctggactttaacgagatgatcctgctgaccatgaagaataaggcctggatggtgcaccgccagtggttctttgatctgccactgccatggacctccggagcaaccacagagacaccaacctggaacagaaaggagctgctggtgacattcaagaatgcccacgccaagaagcaggaggtggtggtgctgggcagccaggagggagcaatgcacaccgccctgacaggagccaccgagatccagaacacaggcggcacctccatctttgccggccacctgaagtgcaggctgaagatggacaagctggagctgaagggcatgtcctacgccatgtgcaccaataccttcgtgctgaagaaggaggtgtctgagacacagcacggcacaatcctgatcaaggtggagtataagggcgaggacgccccttgtaagatccccttttccaccgaggatggccagggcaaggcccacaacggcagactgatcaccgccaatcctgtggtgacaaagaaggaggagccagtgaacatcgaggccgagccacccttcggcgagtctaatatcgtgatcggcaccggcgacaacgccctgaagatcaattggtacaagaagggcagctccatcggcaagatgtttgaggcaaccgccaggggcgccaggaggatggccatcctgggcgatacagcatgggacttcggcagcgtgggaggcgtgctgaactccctgggcaagatggtgcaccagatctttggctccgcctataccgccctgttctctggcgtgagctgggtcatgaagatcggcatcggcgtgctgctgacctggatcggcctgaactctaagaatacatctatgagcttctcctgcatcgccatcggcatcatcaccctgtacctgggcgtggtggtgcaggcagacatgggatgcgtgatcaactggaagggcaaggagctgaagtgtggctccggcatctttgtgaccaatgaggtgcacacatggaccgagcagtataagttccaggccgattctcccaagaggctggccacagcaatcgcaggagcatgggagaactcagtgtgcggcatccggagcaccacaagaatggagaatctgctgtggaagcagatcgccaacgagctgaattacatcctgtgggagaacaatatcaagctgaccgtggtggtgggcgacacaatcggcgtgctggagcagggcaagcgcacactgacccctcagccaatggagctgaagtatagctggaagacctggggcaaggccaagatcgtgacagccgagacacagaactctagcttcatcatcgacggccccaatacacctgagtgcccatctgccagccgggcctggaacgtgtgggaggtggaggattacggctttggcgtgttcaccacaaatatctggctgaagctgagagaggtgtacacccagatgtgcgatcacaggctgatgtccgccgcagtgaaggatgagagggccgtgcacgcagacatgggatactggatcgagtctcagaagaacggcagctggaagctggagaaggcctctctgatcgaggtgaagacatgcacctggcccaagtcccacaccctgtggtctaacggcgtgctggagagcgacatgatcatccctaagagcctggccggcccaatctcccagcacaattaccggcccgggtatcacacacagaccgcaggaccttggcacctgggcaagctggagctggatttcaactattgcgagggcaccacagtggtcatcgccgagaattgtggcaccagaggcccatctctgagaaccacaaccgtgagcggcaagctgatccacgagtggtgctgtaggagctgcacactgcctccactgcgctacatgggcgaggacggctgttggtatggcatggagatcagacccatctccgagaaggaggagaacatggtgaagtccctggtgtctgccggcagcggcaaggtggataacttcaccatgggcgtgctgtgcctggccatcctgtttgaggaagtgatgaggggcaagttcggcaagaagcacatgatcgccggcgtgttctttaccttcgtgctgctgctgagcggacagatcacctggagggacatggcacacacactgatcatgatcggctccaacgcctctgatagaatgggcatgggcgtgacctacctggccctgatcgccaccttcaagatccagccattcctggccctgggcttctttctgaggaagctgacctcccgcgagaacctgctgctgggcgtgggcctggccatggcaacaaccctgcagctgcccgaggacatcgagcagatggccaatggcatcgccctgggcctgatggccctgaagctgatcacccagtttgagatctatcagctgtggacagccctgatctccctgacctgctctaacacaatcttcacactgaccgtggcatggcggacagccaccctgatcctggcaggcgtgagcctgctgcccgtgtgccagtcctctagcatgagaaagaccgactggctgccaatgacagtggcagcaatgggcgtgccccctctgcctctgttcatcttttctctgaaggataccctgaagcggagaagctggcctctgaacgagggcgtgatggcagtgggcctggtgtccatcctggcctcctctctgctgcgcaatgacgtgcctatggcaggaccactggtggcaggaggcctgctgatcgcctgctacgtgatcacaggcacctccgccgatctgacagtggagaaggcagcagacgtgacctgggaggaggaggcagagcagacaggcgtgtctcacaacctgatgatcaccgtggacgatgacggcacaatgcggatcaaggatgacgagacagagaatatcctgacagtgctgctgaagaccgccctgctgatcgtgtctggcatctttccctacagcatccctgccaccctgctggtgtggcacacatggcagaagcagacccagcggagcggcgtgctgtgggacgtgccaagcccaccagagacacagaaggccgagctggaggagggcgtgtatcggatcaagcagcagggcatcctgggcaagacacaagtgggagtgggcgtgcagaaggagggcgtgttccacacaatgtggcacgtgaccagaggcgccgtgctgacccacaacggcaagagactggagcctaattgggctagcgtgaagaaggacctgatctcttacggcggaggatggagactgagcgcccagtggcagaagggagaggaggtgcaggtcatcgccgtggagccaggcaagaaccccaagaattttcagaccatgccaggcacattccagacaaccacaggagagatcggagcaatcgccctggacttcaagcccggcacctccggctctcctatcatcaacagagagggcaaggtggtgggcctgtacggcaacggcgtggtgacaaagaatggaggatacgtgagcggaatcgcacagaccaacgcagagcctgacggaccaacacctgagctggaggaggagatgttcaagaagaggaatctgaccatcatggatctgcacccaggcagcggcaagacacggaagtacctgcccgccatcgtgagagaggccatcaagaggcgcctgaggaccctgatcctggcaccaaccagagtggtggcagcagagatggaggaggccctgaagggcctgccaatccggtatcagaccacagccacaaagtctgagcacaccggcagagagatcgtggacctgatgtgccacgccaccttcaccatgcggctgctgagccctgtgagagtgccaaactacaatctgatcatcatggatgaggcacacttcaccgaccccgcctccatcgcagccaggggctatatctctacccgcgtgggaatgggagagacagcagcaatctttatgacagcaacccctccaggcaccgcagatgccttcccacagagcaacgcccccatccaggatgaggagcgggacatcccagagagaagctggaactccggcaatgagtggatcaccgactttgccggcaagacagtgtggttcgtgccctccatcaaggccggcaacgatatcgccaattgcctgaggaagaatggcaagaaagtgatccagctgtctcgcaagaccttcgagacagagtaccagaagaccaagctgaacgattgggactttgtggtgaccacagacatctccgagatgggcgccaatttcaaggccgatagagtgatcgacccacggagatgtctgaagcccgtgatcctgaccgatggcccagagagagtgatcctggccggcccaatgcccgtgacagcagccagcgccgcacagaggcgcggcagggtgggccgcaaccctcacaaggagaatgaccagtatatcttcaccggccagccactgaacaatgatgaggaccacgcccactggaccgaggccaagatgctgctggataacatcaatacacctgagggcatcatcccagccctgtttgagcccgagagagagaagtctgccgccatcgacggcgagtaccggctgaagggcgagagcagaaagaccttcgtggagctgatgaagaggggcgatctgcccgtgtggctggcccacaaggtggcctccgagggcatcaagtataccgatcggaagtggtgctttgacggccagagaaacaatcagatcctggaggagaacatggacgtggagatctggaccaaggagggcgagaagaagaagctgcggcctagatggctggatgccaggacatacagcgacccactggccctgaaggagtttaaggacttcgcagcaggaaggaagagcatcgccctggatctggtgaccgagatcggccgcgtgccctcccacctggcacacaggacccgcaacgccctggataacctggtcatgctgcacacatccgagcacggcggcagagcctatagacacgccgtggaggagctgcctgagacaatggagacactgctgctgctgggcctgatgatcctgctgaccggaggagccatgctgttcctgatcagcggcaagggcatcggcaagacatccatcggcctgatctgcgtgatcgccagctccggcatgctgtggatggccgagatccctctgcagtggatcgccagcgccatcgtgctggagttctttatgatggtgctgctgatccctgagccagagaagcagcgcaccccacaggacaaccagctggcctacgtggtcatcggcatcctgacactggccgccatcatcgccgccaatgagatgggcctgctggagacaacaaagcgggatctgggcatgtctaaggagcctggcgtggtgtctccaaccagctacctggacgtcgacctgcaccctgccagcgcctggaccctgtatgcagtggcaaccacagtgatcacaccaatgctgagacacacaatcgagaacagcaccgcaaacgtgagcctggccgcaatcgcaaaccaggcagtggtgctgatgggcctggacaagggctggccaatcagcaagatggatctgggcgtgcccctgctggccctgggctgctactcccaagtgaatccactgacactgaccgcagccgtgctgctgctgatcacccactatgccatcatcggccctggcctgcaggcaaaggcaaccagggaggcacagaagcgcacagcagcaggcatcatgaagaacccaaccgtggacggcatcatcacaatcgatctggaccccgtgatctacgatagcaagtttgagaagcagctgggccaggtcatgctgctggtgctgtgcgccgtgcagctgctgctgatgaggacctcctgggcactgtgcgaggccctgacactggccaccggacctatcaccacactgtgggagggctctccaggcaagttctggaacaccacaatcgccgtgtctatggccaatatctttcggggcagctacctggcaggagcaggcctggccttcagcatcatgaagtccgtgggcacaggcaagagaggcaccggcagccagggagagacactgggcgagaagtggaagaagaagctgaaccagctgtccaggaaggagtttgacctgtataagaagtctggcatcacagaggtggatcgcaccgaggcaaaggagggcctgaagagaggagagacaacacaccacgccgtgtcccgcggctctgccaagctgcagtggttcgtggagaggaatatggtcatcccagagggccgcgtgatcgacctgggctgcggccggggaggatggtcctactattgtgccggcctgaagaaggtgaccgaggtgcggggatacacaaagggaggccctggccacgaggagcccgtgcctatgagcacctacggctggaacatcgtgaagctgatgtccggcaaggacgtgttctacctgccccctgagaagtgcgatacactgctgtgcgacatcggcgagtctagcccatcccccaccgtggaggagtctaggacaatccgcgtgctgaagatggtggagccttggctgaagaacaatcagttctgcatcaaggtgctgaatccctacatgcctgccgtgatcgagcacctggagcggctgcagagaaagcacggcggcatgctggtgcggaacccactgagcagaaattccacccacgagatgtattggatctctaacggcacaggcaatatcgtgtcctctgtgaacatggtgagcaggctgctgctgaatcgcttcacaatgacccacagacggcccaccatcgagaaggatgtggacctgggcgcaggcacccgccacgtgaacgccgagccagagacacccaatatggaagtgatcggcgagaggatcaagcgcatcaaggaggagcacaacagcacctggcactacgatgacgagaatccttataagacatgggcctaccacggatcctatgaggtgaaggccaccggctctgccagctccatgatcaacggcgtggtgaagctgctgacaaagccctgggacgtggtgcctatggtgacacagatggccatgaccgataccacaccatttggccagcagagggtgttcaaggagaaggtggacacacggacccctagaccaatgcccggcacccgcaaagtgatggagatcacagcagagtggctgtggaggaccctgggcaggaacaagcggcccagactgtgcacaagagaggagtttaccaagaaggtgaggacaaacgcagcaatgggagccgtgttcaccgaggagaatcagtgggattccgccaaggcagcagtggaggacgaggagttctggaagctggtggatagggagcgcgagctgcacaagctgggcaagtgcggcagctgcgtgtataacatgatgggcaagagagagaagaagctgggcgagtttggcaaggccaagggctccagggccatctggtacatgtggctgggcgcccgctatctggagtttgaggccctgggcttcctgaacgaggaccactggttctctcgggagaatagctactccggagtggagggagagggcctgcacaagctgggctatatcctgagagacatcagcaagatccctggcggcgccatgtatgccgatgacaccgccggctgggatacaagaatcaccgaggatgacctgcacaacgaggagaagatcacccagcagatggaccccgagcacaggctgctggccaacgccatctttaagctgacataccagaataaggtggtgaaggtgcagcgccctacaccaaccggcacagtgatggatatcatcagcaggaaggaccagagaggctccggacaagtgggcacctatggcctgaacaccttcacaaatatggaggcccagctggtgaggcagatggagggagagggcgtgctgagcaaggcagacctggagaatcctcacctgccagagaagaagatcacccagtggctggagacaaagggcgtggagaggctgcagcgcatggccatctccggcgatgactgcgtggtgaagcccatcgatgacaggtttgccaacgccctgctggccctgaatgatatgggcaaggtgagaaaggacatcccccagtggcagccttccaagggctggcacgactggcagcaggtgcctttttgctctcaccacttccacgagctgatcatgaaggacggccggaagctggtggtgccctgtagacctcaggatgagctgatcggacgggccagaatcagccagggagcaggatggtccctgcgggagacagcatgcctgggcaaggcctacgcccagatgtggagcctgatgtatttccacaggcgcgatctgaggctggcctctaacgccatctgtagcgccgtgccagtgcactgggtgcccacctcccgcaccacatggtctatccacgcccaccaccagtggatgaccacagaggacatgctgaccgtgtggaaccgcgtgtggatcgaggataatccctggatggaggacaagacacctgtgaccacatgggagaatgtgccctacctgggcaagcgggaggatcagtggtgtggctctctgatcggcctgaccagcagagccacatgggcccagaacatcagcaccgccatccagcaggtgcggtccctgatcggcaatgaggagttcctggactacatgccaagtatgaaacgattccgcaaagacgaggagagtgagggggctatctggtaaacgcaggaagaggctaattgtcaggccaccttaagccacagtacggaagaagctgtgctgcctgtgagccccgtctaaggacgttaaaagaagaagtcaggccctaaagccacggtttgagcaaaccgtgctgcctgtagctccgtcgtggggacgtaaaaacctgggaggctgcaaactgtggaagctgtacgcacggtgtagcagactagcggttagaggagacccctcccatgacacaacgcagcagcggggcccgagcactgagtgaagctgtacctccttgcaaaggactagaggttagaggagaccccccgcaaacaaaaacagcatattgacgctgggagagaccagagatcctgctgtctcctcagcatcattccaggcacagaacgccagaaaatggaatggtgctgttgaatcaacaggttct

SEQ ID NO: 85 - RNA, 10173 nt, synthetic construct
  source 1..10173: mol_type = other RNA
atgaacaaccaacggaaaaagacgggaaaaccgtctatcaatatgctgaaacgcgtgagaaaccgtgtgtcaactggaagccagctggccaagcggttcagcaagggcctgctgaacggacagggacccatgaagctggtcatggccttcatcgcctttctgaggttcctggccatcccacctaccgcaggcgtgctggccagatggggcaccttcaagaagagcggcgccatcaaggtgctgaagggcttcaagcgggagatctctaacatgctgagcatcatcaataagagaaagaagacctctctgtgcctgatgatgatcctgccagccgccctggcctttcacctgacaagcagggacggcgagcctcgcatgatcgtgggcaagaacgagcggggcaagtccctgctgttcaagacagcctctggcatcaatatgtgcaccctgatcgccatggatctgggcgagatgtgcgacgataccgtgacatacaagtgtcctcacatcaccgaggtggagccagaggatatcgactgctggtgtaacctgacctctacatgggtgacctatggcacatgcaatcaggccggcgagcaccggagagacaagaggagcgtggccctggcccctcacgtgggcatgggcctggatacccgcacacagacctggatgtccgccgagggagcatggaggcaggtggagaaggtggagacatgggccctgagacaccccggctttacaatcctggccctgttcctggcccactacatcggcacctccctgacacagaaggtggtcatcttcatcctgctgatgctggtgacaccttctatgaccatgagatgcgtgggagtgggaaacagggacttcgtggagggcctgagcggagcaacctgggtggatgtggtgctggagcacggaggatgcgtgaccacaatggccaagaataagcccaccctggacatcgagctgcagaagaccgaggccacacagctggccacactgaggaagctgtgcatcgagggcaagatcaccaacatcaccacagatagcaggtgtccaacacagggagaggccgtgctgccagaggagcaggaccagaactacgtgtgcaagcacacgtacgtggatagaggctggggcaatggctgtggcctgtttggcaagggctccctggtgacatgcgccaagttccagtgtctggagctgatcgagggcaaggtggtgcagtacgagaacctgaagtataccgtgatcatcaccgtgcacacaggcgaccagcaccaagtgggcaatgagacacagggagtgaccgcagagatcacaccacaggccagcaccacagaggccatcctgcctgagtacggcaccctgggcctggagtgctccccccggaccggcctggactttaacgagatgatcctgctgaccatgaagaataaggcctggatggtgcaccgccagtggttctttgatctgccactgccatggacctccggagcaaccacagagacaccaacctggaacagaaaggagctgctggtgacattcaagaatgcccacgccaagaagcaggaggtggtggtgctgggcagccaggagggagcaatgcacaccgccctgacaggagccaccgagatccagaacacaggcggcacctccatctttgccggccacctgaagtgcaggctgaagatggacaagctggagctgaagggcatgtcctacgccatgtgcaccaataccttcgtgctgaagaaggaggtgtctgagacacagcacggcacaatcctgatcaaggtggagtataagggcgaggacgccccttgtaagatccccttttccaccgaggatggccagggcaaggcccacaacggcagactgatcaccgccaatcctgtggtgacaaagaaggaggagccagtgaacatcgaggccgagccacccttcggcgagtctaatatcgtgatcggcaccggcgacaacgccctgaagatcaattggtacaagaagggcagctccatcggcaagatgtttgaggcaaccgccaggggcgccaggaggatggccatcctgggcgatacagcatgggacttcggcagcgtgggaggcgtgctgaactccctgggcaagatggtgcaccagatctttggctccgcctataccgccctgttctctggcgtgagctgggtcatgaagatcggcatcggcgtgctgctgacctggatcggcctgaactctaagaatacatctatgagcttctcctgcatcgccatcggcatcatcaccctgtacctgggcgtggtggtgcaggcagacatgggatgcgtgatcaactggaagggcaaggagctgaagtgtggctccggcatctttgtgaccaatgaggtgcacacatggaccgagcagtataagttccaggccgattctcccaagaggctggccacagcaatcgcaggagcatgggagaactcagtgtgcggcatccggagcaccacaagaatggagaatctgctgtggaagcagatcgccaacgagctgaattacatcctgtgggagaacaatatcaagctgaccgtggtggtgggcgacacaatcggcgtgctggagcagggcaagcgcacactgacccctcagccaatggagctgaagtatagctggaagacctggggcaaggccaagatcgtgacagccgagacacagaactctagcttcatcatcgacggccccaatacacctgagtgcccatctgccagccgggcctggaacgtgtgggaggtggaggattacggctttggcgtgttcaccacaaatatctggctgaagctgagagaggtgtacacccagatgtgcgatcacaggctgatgtccgccgcagtgaaggatgagagggccgtgcacgcagacatgggatactggatcgagtctcagaagaacggcagctggaagctggagaaggcctctctgatcgaggtgaagacatgcacctggcccaagtcccacaccctgtggtctaacggcgtgctggagagcgacatgatcatccctaagagcctggccggcccaatctcccagcacaattaccggcccgggtatcacacacagaccgcaggaccttggcacctgggcaagctggagctggatttcaactattgcgagggcaccacagtggtcatcgccgagaattgtggcaccagaggcccatctctgagaaccacaaccgtgagcggcaagctgatccacgagtggtgctgtaggagctgcacactgcctccactgcgctacatgggcgaggacggctgttggtatggcatggagatcagacccatctccgagaaggaggagaacatggtgaagtccctggtgtctgccggcagcggcaaggtggataacttcaccatgggcgtgctgtgcctggccatcctgtttgaggaagtgatgaggggcaagttcggcaagaagcacatgatcgccggcgtgttctttaccttcgtgctgctgctgagcggacagatcacctggagggacatggcacacacactgatcatgatcggctccaacgcctctgatagaatgggcatgggcgtgacctacctggccctgatcgccaccttcaagatccagccattcctggccctgggcttctttctgaggaagctgacctcccgcgagaacctgctgctgggcgtgggcctggccatggcaacaaccctgcagctgcccgaggacatcgagcagatggccaatggcatcgccctgggcctgatggccctgaagctgatcacccagtttgagatctatcagctgtggacagccctgatctccctgacctgctctaacacaatcttcacactgaccgtggcatggcggacagccaccctgatcctggcaggcgtgagcctgctgcccgtgtgccagtcctctagcatgagaaagaccgactggctgccaatgacagtggcagcaatgggcgtgccccctctgcctctgttcatcttttctctgaaggataccctgaagcggagaagctggcctctgaacgagggcgtgatggcagtgggcctggtgtccatcctggcctcctctctgctgcgcaatgacgtgcctatggcaggaccactggtggcaggaggcctgctgatcgcctgctacgtgatcacaggcacctccgccgatctgacagtggagaaggcagcagacgtgacctgggaggaggaggcagagcagacaggcgtgtctcacaacctgatgatcaccgtggacgatgacggcacaatgcggatcaaggatgacgagacagagaatatcctgacagtgctgctgaagaccgccctgctgatcgtgtctggcatctttccctacagcatccctgccaccctgctggtgtggcacacatggcagaagcagacccagcggagcggcgtgctgtgggacgtgccaagcccaccagagacacagaaggccgagctggaggagggcgtgtatcggatcaagcagcagggcatcctgggcaagacacaagtgggagtgggcgtgcagaaggagggcgtgttccacacaatgtggcacgtgaccagaggcgccgtgctgacccacaacggcaagagactggagcctaattgggctagcgtgaagaaggacctgatctcttacggcggaggatggagactgagcgcccagtggcagaagggagaggaggtgcaggtcatcgccgtggagccaggcaagaaccccaagaattttcagaccatgccaggcacattccagacaaccacaggagagatcggagcaatcgccctggacttcaagcccggcacctccggctctcctatcatcaacagagagggcaaggtggtgggcctgtacggcaacggcgtggtgacaaagaatggaggatacgtgagcggaatcgcacagaccaacgcagagcctgacggaccaacacctgagctggaggaggagatgttcaagaagaggaatctgaccatcatggatctgcacccaggcagcggcaagacacggaagtacctgcccgccatcgtgagagaggccatcaagaggcgcctgaggaccctgatcctggcaccaaccagagtggtggcagcagagatggaggaggccctgaagggcctgccaatccggtatcagaccacagccacaaagtctgagcacaccggcagagagatcgtggacctgatgtgccacgccaccttcaccatgcggctgctgagccctgtgagagtgccaaactacaatctgatcatcatggatgaggcacacttcaccgaccccgcctccatcgcagccaggggctatatctctacccgcgtgggaatgggagagacagcagcaatctttatgacagcaacccctccaggcaccgcagatgccttcccacagagcaacgcccccatccaggatgaggagcgggacatcccagagagaagctggaactccggcaatgagtggatcaccgactttgccggcaagacagtgtggttcgtgccctccatcaaggccggcaacgatatcgccaattgcctgaggaagaatggcaagaaagtgatccagctgtctcgcaagaccttcgagacagagtaccagaagaccaagctgaacgattgggactttgtggtgaccacagacatctccgagatgggcgccaatttcaaggccgatagagtgatcgacccacggagatgtctgaagcccgtgatcctgaccgatggcccagagagagtgatcctggccggcccaatgcccgtgacagcagccagcgccgcacagaggcgcggcagggtgggccgcaaccctcacaaggagaatgaccagtatatcttcaccggccagccactgaacaatgatgaggaccacgcccactggaccgaggccaagatgctgctggataacatcaatacacctgagggcatcatcccagccctgtttgagcccgagagagagaagtctgccgccatcgacggcgagtaccggctgaagggcgagagcagaaagaccttcgtggagctgatgaagaggggcgatctgcccgtgtggctggcccacaaggtggcctccgagggcatcaagtataccgatcggaagtggtgctttgacggccagagaaacaatcagatcctggaggagaacatggacgtggagatctggaccaaggagggcgagaagaagaagctgcggcctagatggctggatgccaggacatacagcgacccactggccctgaaggagtttaaggacttcgcagcaggaaggaagagcatcgccctggatctggtgaccgagatcggccgcgtgccctcccacctggcacacaggacccgcaacgccctggataacctggtcatgctgcacacatccgagcacggcggcagagcctatagacacgccgtggaggagctgcctgagacaatggagacactgctgctgctgggcctgatgatcctgctgaccggaggagccatgctgttcctgatcagcggcaagggcatcggcaagacatccatcggcctgatctgcgtgatcgccagctccggcatgctgtggatggccgagatccctctgcagtggatcgccagcgccatcgtgctggagttctttatgatggtgctgctgatccctgagccagagaagcagcgcaccccacaggacaaccagctggcctacgtggtcatcggcatcctgacactggccgccatcatcgccgccaatgagatgggcctgctggagacaacaaagcgggatctgggcatgtctaaggagcctggcgtggtgtctccaaccagctacctggacgtcgacctgcaccctgccagcgcctggaccctgtatgcagtggcaaccacagtgatcacaccaatgctgagacacacaatcgagaacagcaccgcaaacgtgagcctggccgcaatcgcaaaccaggcagtggtgctgatgggcctggacaagggctggccaatcagcaagatggatctgggcgtgcccctgctggccctgggctgctactcccaagtgaatccactgacactgaccgcagccgtgctgctgctgatcacccactatgccatcatcggccctggcctgcaggcaaaggcaaccagggaggcacagaagcgcacagcagcaggcatcatgaagaacccaaccgtggacggcatcatcacaatcgatctggaccccgtgatctacgatagcaagtttgagaagcagctgggccaggtcatgctgctggtgctgtgcgccgtgcagctgctgctgatgaggacctcctgggcactgtgcgaggccctgacactggccaccggacctatcaccacactgtgggagggctctccaggcaagttctggaacaccacaatcgccgtgtctatggccaatatctttcggggcagctacctggcaggagcaggcctggccttcagcatcatgaagtccgtgggcacaggcaagagaggcaccggcagccagggagagacactgggcgagaagtggaagaagaagctgaaccagctgtccaggaaggagtttgacctgtataagaagtctggcatcacagaggtggatcgcaccgaggcaaaggagggcctgaagagaggagagacaacacaccacgccgtgtcccgcggctctgccaagctgcagtggttcgtggagaggaatatggtcatcccagagggccgcgtgatcgacctgggctgcggccggggaggatggtcctactattgtgccggcctgaagaaggtgaccgaggtgcggggatacacaaagggaggccctggccacgaggagcccgtgcctatgagcacctacggctggaacatcgtgaagctgatgtccggcaaggacgtgttctacctgccccctgagaagtgcgatacactgctgtgcgacatcggcgagtctagcccatcccccaccgtggaggagtctaggacaatccgcgtgctgaagatggtggagccttggctgaagaacaatcagttctgcatcaaggtgctgaatccctacatgcctgccgtgatcgagcacctggagcggctgcagagaaagcacggcggcatgctggtgcggaacccactgagcagaaattccacccacgagatgtattggatctctaacggcacaggcaatatcgtgtcctctgtgaacatggtgagcaggctgctgctgaatcgcttcacaatgacccacagacggcccaccatcgagaaggatgtggacctgggcgcaggcacccgccacgtgaacgccgagccagagacacccaatatggaagtgatcggcgagaggatcaagcgcatcaaggaggagcacaacagcacctggcactacgatgacgagaatccttataagacatgggcctaccacggatcctatgaggtgaaggccaccggctctgccagctccatgatcaacggcgtggtgaagctgctgacaaagccctgggacgtggtgcctatggtgacacagatggccatgaccgataccacaccatttggccagcagagggtgttcaaggagaaggtggacacacggacccctagaccaatgcccggcacccgcaaagtgatggagatcacagcagagtggctgtggaggaccctgggcaggaacaagcggcccagactgtgcacaagagaggagtttaccaagaaggtgaggacaaacgcagcaatgggagccgtgttcaccgaggagaatcagtgggattccgccaaggcagcagtggaggacgaggagttctggaagctggtggatagggagcgcgagctgcacaagctgggcaagtgcggcagctgcgtgtataacatgatgggcaagagagagaagaagctgggcgagtttggcaaggccaagggctccagggccatctggtacatgtggctgggcgcccgctatctggagtttgaggccctgggcttcctgaacgaggaccactggttctctcgggagaatagctactccggagtggagggagagggcctgcacaagctgggctatatcctgagagacatcagcaagatccctggcggcgccatgtatgccgatgacaccgccggctgggatacaagaatcaccgaggatgacctgcacaacgaggagaagatcacccagcagatggaccccgagcacaggctgctggccaacgccatctttaagctgacataccagaataaggtggtgaaggtgcagcgccctacaccaaccggcacagtgatggatatcatcagcaggaaggaccagagaggctccggacaagtgggcacctatggcctgaacaccttcacaaatatggaggcccagctggtgaggcagatggagggagagggcgtgctgagcaaggcagacctggagaatcctcacctgccagagaagaagatcacccagtggctggagacaaagggcgtggagaggctgcagcgcatggccatctccggcgatgactgcgtggtgaagcccatcgatgacaggtttgccaacgccctgctggccctgaatgatatgggcaaggtgagaaaggacatcccccagtggcagccttccaagggctggcacgactggcagcaggtgcctttttgctctcaccacttccacgagctgatcatgaaggacggccggaagctggtggtgccctgtagacctcaggatgagctgatcggacgggccagaatcagccagggagcaggatggtccctgcgggagacagcatgcctgggcaaggcctacgcccagatgtggagcctgatgtatttccacaggcgcgatctgaggctggcctctaacgccatctgtagcgccgtgccagtgcactgggtgcccacctcccgcaccacatggtctatccacgcccaccaccagtggatgaccacagaggacatgctgaccgtgtggaaccgcgtgtggatcgaggataatccctggatggaggacaagacacctgtgaccacatgggagaatgtgccctacctgggcaagcgggaggatcagtggtgtggctctctgatcggcctgaccagcagagccacatgggcccagaacatcagcaccgccatccagcaggtgcggtccctgatcggcaatgaggagttcctggactacatgccaagtatgaaacgattccgcaaagacgaggagagtgagggggctatctggtaa